(19) United States
(12) Patent Application Publication
(10) Pub. No.: US 2024/0132895 A1
(43) Pub. Date: Apr. 25, 2024

(54) GLYCOGEN SYNTHASE KINASE 3 ALPHA (GSK3 ALPHA) iRNA COMPOSITIONS AND METHODS OF USE THEREOF

(71) Applicant: Alnylam Pharmaceuticals, Inc., Cambridge, MA (US)

(72) Inventors: William Cantley, Brighton, MA (US); Jeffrey Zuber, Somerville, MA (US); Adam Castoreno, Framingham, MA (US); Charalambos Kaittanis, Cambridge, MA (US)

(21) Appl. No.: 18/243,133

(22) Filed: Sep. 7, 2023

Related U.S. Application Data
(63) Continuation of application No. PCT/US2022/019716, filed on Mar. 10, 2022.
(60) Provisional application No. 63/287,132, filed on Dec. 8, 2021.
(60) Provisional application No. 63/181,382, filed on Apr. 29, 2021.
(60) Provisional application No. 63/160,022, filed on Mar. 12, 2021.

(51) Int. Cl. C12N 15/113

(52) U.S. Cl. CPC C12N 15/1137; C12Y 207/11026; C12N 2310/14; C12N 2310/315; C12N 2310/317; C12N 2310/3515; C12N 2310/53

(57) ABSTRACT

The disclosure relates to double stranded ribonucleic acid (dsRNAi) agents and compositions targeting a GSK3α gene, as well as methods of inhibiting expression of a GSK3α gene and methods of treating subjects having a GSK3α associated neurodegenerative disease or disorder, e.g., Fragile X Syndrome, using such dsRNAi agents and compositions.

### RELATED APPLICATIONS

[0001] This application is a 35 § U.S.C. 111(a) continuation application which claims the benefit of priority to PCT/US2022/019716, filed on Mar. 10, 2022, which, in turn, claims the benefit of priority to U.S. Provisional Application No. 63/160,022, filed on Mar. 12, 2021, U.S. Provisional Application No. 63/181,382, filed on Apr. 29, 2021, and U.S. Provisional Application No. 63/287,132, filed on Dec. 8, 2021. The entire contents of each of the foregoing applications are incorporated herein by reference.

### SEQUENCE LISTING

[0002] The application contains a Sequence Listing which has been submitted electronically in .XML format and is hereby incorporated by reference in its entirety. Said .XML copy, created on Nov. 24, 2023, is named “121301_14104_SL.xml” and is 5,362,476 bytes in size. The sequence listing contained in this .XML file is part of the specification and is hereby incorporated by reference herein in its entirety.

### BACKGROUND OF THE INVENTION

[0003] Fragile X Syndrome (FXS) is an X-linked disorder caused by the loss of fragile X mental retardation protein (FMRP) due to a CGG triplet repeat expansion in the 5′ UTR of the fragile X mental retardation 1 (FMR1) gene (Verkerk A J M H, et al., Cell. 1991; 65(5):905-914). In phenotypically normal individuals this triplet is repeated between about 5 and about 40 times, while individuals with greater than about 200 repeats (known as the full mutation) present with FXS (Willemsen R, et al. Clin Genet. 2011; 80(3):214-225). As the most common known cause of inherited intellectual disability, an estimated 1:4000-7000 males and 1:8,000-11,000 females possess the full FMR1 mutation (Hersh J H, et al. Pediatrics. 2011; 127(5):994-1006; Hunter J, et al. Am J Med Genet Part A. 2014; 164(7):1648-1658). FXS patients present with a variety of symptoms spanning developmental, psychological, and physical characteristics. Some of the most common clinical features of FXS are language deficit, intellectual disability, attention-deficit hyperactivity disorder, and to a lesser extent seizures (Rajaratnam A, et al. F1000 Research. 2017; 6(0):2112).

[0004] An important target of potential interest in FXS is glycogen synthase kinase (GSK3). GSK3 has two paralogs, GSK3α and GSKβ, which are derived from different genes (J. R. Woodgett, EMBO J. 9, 2431-2438 (1990)). Despite sharing 67% overall sequence homology and 95% amino acid sequence identity within their adenosine triphosphate-binding domains, these paralogs have some nonredundant actions within cells (J. R. Woodgett, EMBO J. 9, 2431-2438 (1990); R. Dajani, et al. Cell 105, 721-732 (2001); O. Kaidanovich-Beilin, J. R. Woodgett, Front. Mol. Neurosci. 4, 40 (2011). Mice lacking both alleles of GSK3α are viable, whereas deletion of GSK3β is embryonic lethal (O. Kaidanovich-Beilin, et al. Mol. Brain 2, 35 (2009); K. P. Hoeflich, et al. Nature 406, 86-90 (2000); K. MacAulay, et al. Cell Metab. 6, 329-337 (2007)).

[0005] Inhibitory phosphorylation of GSK3 has been shown to be reduced in FXS mouse models, and several treatments that inhibit GSK3 were shown to correct mutant phenotypes in FXS mice (M. A. Mines, et al Front. Mol. Neurosci. 4, 35 (2011). For example, inhibition of GSK3 has been proposed to account for the beneficial effects of lithium treatment in FSX mouse models (C. H. Choi, et al. Brain Res. 1380, 106-119 (2011); Z. H. Liu, et al Neurobiol. Dis. 45, 1145-1152 (2012)). However, translating these findings to the clinic has proven challenging. Although results in an open-label trial were suggestive of benefit in FXS, numerous side effects limit the potential of lithium as a therapeutic in children and adolescents with FXS and other autism spectrum disorders (E. Berry-Kravis, et al. J. Dev. Behav. Pediatr. 29, 293-302 (2008); M. Siegel, et al. J. Child Adolesc. Psychopharmacol. 24, 399-402 (2014)).

[0006] To overcome the limitations of lithium, attempts have been made to develop GSK3 paralog-selective inhibitors. Although certain compounds such as AR-A014418 and SB216763 can inhibit GSK3 and ameliorate FXS phenotypes in animal models, they do not have kinome selectivity and have toxicity that prevents chronic human use (R. Bhat, et al. J. Biol. Chem. 278, 45937-45945 (2003); M. P. Coghlan, et al. Chem. Biol. 7, 793-803 (2000); O. O'Leary, et al. CNS Drugs 29, 1-15 (2015); F. F. Wagner, et al. ACS Chem. Biol. 11, 1952-1963 (2016)). Recent studies have shown that there is a possibility that the associated toxicity could be avoided with GSK3 paralog-selective inhibitors, e.g., inhibitors that specifically target GSK3α. For example, a paralog-specific small molecule specific inhibited GSK3α and corrected a number of common phenotypes present in the FMR^{-/y} mouse model (audiogenic seizures, exaggerated protein synthesis, cortical hyperexcitability, and inhibitory avoidance learning tasks) (McCamphill P K, et al. Sci Transl Med. 2020; 12(544). doi:10.1126/scitranslmed.aam8572).

[0007] Effective treatments for Fragile X Syndrome are currently not available and any treatments that are available are palliative. Thus, there remains a need for an agent that can selectively and efficiently silences the GSK3α gene using the cell's own RNAi machinery that has both high biological activity and in vivo stability.

### BRIEF SUMMARY OF THE INVENTION

[0008] The present disclosure provides RNAi agent compositions which effect the RNA-induced silencing complex (RISC)-mediated cleavage of RNA transcripts of a Glycogen Synthase Kinase 3 alpha (GSK3α) gene. The GSK3A gene may be within a cell, e.g., a cell within a subject, such as a human. The present disclosure also provides methods of using the RNAi agent compositions of the disclosure for inhibiting the expression of a GSK3α gene and/or for treating a subject who would benefit from inhibiting or reducing the expression of a GSK3A gene, e.g., a subject suffering or prone to suffering from a GSK3α-associated neurodegenerative disease, e.g., Fragile X Syndrome (FXS).

[0009] Accordingly, in one aspect, the instant disclosure provides a double stranded ribonucleic acid (RNAi) agent for inhibiting expression of a Glycogen Synthase Kinase 3 alpha (GSK3α) gene, wherein the RNAi agent includes a sense strand and an antisense strand, and wherein the antisense strand includes a region of complementarity which includes at least 15, e.g., 15, 16, 17, 18, 19, 20, 21, 22, or 23, contiguous nucleotides differing by no more than 3 nucleotides (i.e., differing by 3, 2, 1, or 0 nucleotides) from any one of the antisense sequences listed in any one of Tables 2-5 and 8-9. In certain embodiments, the antisense strand includes a region of complementarity which includes at least 15, e.g., 15, 16, 17, 18, 19, 20, 21, 22, or 23, contiguous nucleotides of any one of the antisense sequences listed in any one of Tables 2-5 and 8-9. In certain embodiments, the antisense strand includes a region of complementarity which includes at least 19, e.g., 19, 20, 21, 22, or 23, contiguous nucleotides differing by no more than 3 nucleotides (i.e., differing by 3, 2, 1, or 0 nucleotides) from any one of the antisense sequences listed in any one of Tables 2-5 and 8-9. In certain embodiments, the antisense strand includes a region of complementarity which includes at least 19, e.g., 19, 20, 21, 22, or 23, contiguous nucleotides of any one of the antisense sequences listed in any one of Tables 2-5 and 8-9. In certain embodiments, thymine-to-uracil or uracil-to-thymine differences between aligned (compared) sequences are not counted as nucleotides that differ between the aligned (compared) sequences.

[0010] In one embodiment, the dsRNA agent comprises a sense strand comprising a contiguous nucleotide sequence which has at least 85%, e.g., 85%, 90%, 91%, 92%, 93%, 94%, 95%, 96%, 97%, 98%, 99%, or 100%, nucleotide sequence identity over its entire length to any one of the nucleotide sequences of the sense strands in any one of Tables 2-5 and 8-9 and an antisense strand comprising a contiguous nucleotide sequence which has at least 85%, e.g., 85%, 90%, 91%, 92%, 93%, 94%, 95%, 96%, 97%, 98%, 99%, or 100%, nucleotide sequence identity over its entire length to any one of the nucleotide sequences of the antisense strands in any one of Tables 2-5 and 8-9.

[0011] In one embodiment, the dsRNA agent comprises a sense strand comprising at least 15, e.g., 15, 16, 17, 18, 19, 20, or 21, contiguous nucleotides differing by no more than three nucleotides from any one of the nucleotide sequences of the sense strands in any one of Tables 2-5 and 8-9 and an antisense strand comprising at least 15, e.g., 15, 16, 17, 18, 19, 20, 21, 22, or 23, contiguous nucleotides differing by no more than three nucleotides from any one of the nucleotide sequences of the antisense strands in any one of Tables 2-5 and 8-9.

[0012] In one embodiment, the dsRNA agent comprises a sense strand comprising at least 15, e.g., 15, 16, 17, 18, 19, 20, or 21, contiguous nucleotides differing by no more than two nucleotides from any one of the nucleotide sequences of the sense strands in any one of Tables 2-5 and 8-9 and an antisense strand comprising at least 15, e.g., 15, 16, 17, 18, 19, 20, 21, 22, or 23, contiguous nucleotides differing by no more than two nucleotides from any one of the nucleotide sequences of the antisense strands in any one of Tables 2-5 and 8-9.

[0013] In one embodiment, the dsRNA agent comprises a sense strand comprising at least 15, e.g., 15, 16, 17, 18, 19, 20, or 21, contiguous nucleotides differing by no more than one nucleotide from any one of the nucleotide sequences of the sense strands in any one of Tables 2-5 and 8-9 and an antisense strand comprising at least 15, e.g., 15, 16, 17, 18, 19, 20, 21, 22, or 23, contiguous nucleotides differing by no more than one nucleotide from any one of the nucleotide sequences of the antisense strands in any one of Tables 2-5 and 8-9.

[0014] In one embodiment, the dsRNA agent comprises a sense strand comprising or consisting of a nucleotide sequence selected from the group consisting of any one of the nucleotide sequences of the sense strands in any one of Tables 2-5 and 8-9 and an antisense strand comprising or consisting of a nucleotide sequence selected from the group consisting of any one of the nucleotide sequences of the antisense strands in any one of Tables 2-5 and 8-9.

[0015] In one aspect, the instant disclosure provides a double stranded ribonucleic acid (dsRNA) agent for inhibiting expression of Glycogen Synthase Kinase 3 alpha (GSK3α), wherein the dsRNA agent comprises a sense strand and an antisense strand forming a double stranded region, wherein the sense strand comprises at least 15, e.g., 15, 16, 17, 18, 19, 20, or 21, contiguous nucleotides differing by no more than 3 nucleotides from any one of the nucleotide sequences of nucleotides 476-518, 588-620, 610-638, 636-664, 676-722, 688-722, 900-928, 955-992, 1007-1035, 1026-1054, 1187-1222, 1187-1252, 1224-1252, 1265-1298, 1342-1370, 1397-1433, 1509-1554, 1509-1537, 1563-1591, 1760-1791, 1983-2017, 1983-2011, 2116-2191, and 2116-2164, of SEQ ID NO: 1, and the antisense strand comprises at least 15, e.g., 15, 16, 17, 18, 19, 20, 21, 22, or 23, contiguous nucleotides from the corresponding nucleotide sequence of SEQ ID NO: 2.

[0016] In one aspect, the instant disclosure provides a double stranded ribonucleic acid (dsRNA) agent for inhibiting expression of Glycogen Synthase Kinase 3 alpha (GSK3α), wherein the dsRNA agent comprises a sense strand and an antisense strand forming a double stranded region, wherein the sense strand comprises at least 15, e.g., 15, 16, 17, 18, 19, 20, or 21, contiguous nucleotides differing by no more than 3 nucleotides from any one of the nucleotide sequences of nucleotides 542-564; 666-688; 1012-1034; 1573-1595; 1845-1867; 2075-2097; 2225-2247; 2227-2249 of SEQ ID NO: 1, and the antisense strand comprises at least 15, e.g., 15, 16, 17, 18, 19, 20, 21, 22, or 23, contiguous nucleotides from the corresponding nucleotide sequence of SEQ ID NO: 2.

[0017] In some embodiments, the sense strand comprises at least 15, e.g., 15, 16, 17, 18, 19, 20, or 21 contiguous nucleotides differing by no more than 3 nucleotides from any one of the nucleotide sequences of nucleotides 1573-1595, 1845-1867, 2075-2097 and 2225-2247 of SEQ ID NO: 1, and the antisense strand comprises at least 15, e.g., 15, 16, 17, 18, 19, 20, 21, 22, or 23, contiguous nucleotides from the corresponding nucleotide sequence of SEQ ID NO: 2.

[0018] In some embodiments, the antisense strand comprises at least 15, e.g., 15, 16, 17, 18, 19, 20, 21, 22, or 23, contiguous nucleotides differing by no more than three nucleotides from any one of the antisense strand nucleotide sequences of a duplex selected from the group consisting of AD-1190533.1; AD-1190657.1; AD-1190925.1; AD-1191336.1; AD-1191510.1; AD-1191578.1; AD-1191658.1; and AD-1191660.1.

[0019] In some embodiments, the antisense strand comprises at least 15, e.g., 15, 16, 17, 18, 19, 20, 21, 22, or 23, contiguous nucleotides differing by no more than three nucleotides from any one of the antisense strand nucleotide sequences of a duplex selected from the group consisting of AD-1531847, AD-1531848, AD-1531849 and AD-1531850.

[0020] In some embodiments, the sense strand or the antisense strand is conjugated to one or more lipophilic moieties.

[0021] In some embodiments, the agents include one or more lipophilic moieties conjugated to one or more internal nucleotide positions, optionally via a linker or carrier.

[0022] In other embodiments, the agent further comprises a targeting ligand that targets a liver tissue, e.g., one or more GalNAc derivatives, optionally conjugated to the double stranded RNAi agent via a linker or carrier.

[0023] In yet other embodiments, the agents further comprise one or more lipophilic moieties conjugated to one or more internal nucleotide positions, optionally via a linker or carrier and a targeting ligand that targets a liver tissue, e.g., one or more GalNAc derivatives, optionally conjugated to the double stranded RNAi agent via a linker or carrier.

[0024] Another aspect of the instant disclosure provides a double stranded RNAi agent for inhibiting expression of a Glycogen Synthase Kinase 3 alpha (GSK3α) gene, wherein the dsRNA agent includes a sense strand and an antisense strand, wherein the sense strand includes at least 15, e.g., 15, 16, 17, 18, 19, 20, or 21, contiguous nucleotides differing by no more than 3 nucleotides (i.e., differing by 3, 2, 1, or 0 nucleotides) from any one of the sense strand sequences presented in Tables 2-5 and 8-9; and wherein the antisense strand includes at least 15, e.g., 15, 16, 17, 18, 19, 20, 21, 22, or 23, contiguous nucleotides differing by no more than 3 nucleotides from any one of antisense strand nucleotide sequences presented in Tables 2-5 and 8-9. In certain embodiments, the sense strand includes at least 15, e.g., 15, 16, 17, 18, 19, 20, or 21, contiguous nucleotides of any one of the sense strand sequences presented in Tables 2-5 and 8-9; and the antisense strand includes at least 15, e.g., 15, 16, 17, 18, 19, 20, 21, 22, or 23, contiguous nucleotides of any one of the antisense strand nucleotide sequences presented in Tables 2-5 and 8-9. In certain embodiments, the sense strand includes at least 19, e.g., 19, 20, or 21, contiguous nucleotides of any one of the sense strand sequences presented in Tables 2-5 and 8-9; and the antisense strand includes at least 19, e.g., 19, 20, 21, 22, or 23, contiguous nucleotides of any one of the antisense strand nucleotide sequences presented in Tables 2-5 and 8-9.

[0025] In some embodiments, the agents include one or more lipophilic moieties conjugated to one or more internal nucleotide positions, optionally via a linker or carrier.

[0026] In other embodiments, the agent further comprises a targeting ligand that targets a liver tissue, e.g., one or more GalNAc derivatives, optionally conjugated to the double stranded RNAi agent via a linker or carrier.

[0027] In yet other embodiments, the agents further comprise one or more lipophilic moieties conjugated to one or more internal nucleotide positions, optionally via a linker or carrier and a targeting ligand that targets a liver tissue, e.g., one or more GalNAc derivatives, optionally conjugated to the double stranded RNAi agent via a linker or carrier.

[0028] An additional aspect of the disclosure provides a double stranded RNAi agent for inhibiting expression of a Glycogen Synthase Kinase 3 alpha (GSK3α) gene, wherein the dsRNA agent includes a sense strand and an antisense strand, wherein the sense strand includes at least 15 contiguous nucleotides differing by no more than 3 nucleotides (i.e., differing by 3, 2, 1, or 0 nucleotides) from any one of the nucleotide sequences of SEQ ID NOs: 1, 3, 5, or 7, or a nucleotide sequence having at least 90% nucleotide sequence identity, e.g. 90, 91, 92, 93, 94, 95, 96, 97, 98, 99, or 100% identity, to the entire nucleotide sequence of any one of SEQ ID NOs: 1, 3, 5, or 7, wherein a substitution of a uracil for any thymine of SEQ ID NOs: 1, 3, 5, and 7 (when comparing aligned sequences) does not count as a difference that contributes to the differing by no more than 3 nucleotides (i.e., differing by 3, 2, 1, or 0 nucleotides) from any one of the nucleotide sequences of SEQ ID NOs: 1, 3, 5, or 7, or the nucleotide sequence having at least 90% nucleotide sequence identity, e.g. 90, 91, 92, 93, 94, 95, 96, 97, 98, 99, or 100% identity, to the entire nucleotide sequence of any one of SEQ ID NOs: 1, 3, 5, or 7; and wherein the antisense strand includes at least 15 contiguous nucleotides differing by no more than 3 nucleotides from any one of the nucleotide sequences of SEQ ID NOs: 2, 4, 6, or 8, or a nucleotide sequence having at least 90% nucleotide sequence identity, e.g. 90, 91, 92, 93, 94, 95, 96, 97, 98, 99, or 100% identity, to the entire nucleotide sequence of any one of SEQ ID NOs: 2, 4, 6, or 8, wherein a substitution of a uracil for any thymine of SEQ ID NOs: 2, 4, 6 or 8, (when comparing aligned sequences) does not count as a difference that contributes to the differing by no more than 3 nucleotides from any one of the nucleotide sequences of SEQ ID NOs: 2, 4, 6, or 8, or the nucleotide sequence having at least 90% nucleotide sequence identity, e.g. 90, 91, 92, 93, 94, 95, 96, 97, 98, 99, or 100% identity, to the entire nucleotide sequence of any one of SEQ ID NOs: 2, 4, 6, or 8, wherein at least one of the sense strand and the antisense strand includes one or more lipophilic moieties conjugated to one or more internal nucleotide positions, optionally via a linker or carrier.

[0029] In one embodiment, the double stranded RNAi agent targeted to GSK3α comprises a sense strand which includes at least 15, e.g., 15, 16, 17, 18, 19, 20, or 21, contiguous nucleotides differing by no more than 3 nucleotides (i.e., differing by 3, 2, 1, or 0 nucleotides) from the nucleotide sequence of the sense strand nucleotide sequence of a duplex in Tables 2-5 and 8-9.

[0030] In one embodiment, the double stranded RNAi agent targeted to GSK3α comprises an antisense strand which includes at least 15, e.g., 15, 16, 17, 18, 19, 20, 21, 22, or 23, contiguous nucleotides differing by no more than 3 nucleotides (i.e., differing by 3, 2, 1, or 0 nucleotides) from the antisense nucleotide sequence of a duplex in one of Tables 2-5 and 8-9.

[0031] In some embodiments, the agent further comprises a targeting ligand that targets a liver tissue, e.g., one or more GalNAc derivatives, optionally conjugated to the double stranded RNAi agent via a linker or carrier.

[0032] Optionally, the double stranded RNAi agent includes at least one modified nucleotide.

[0033] In certain embodiments, the lipophilicity of the lipophilic moiety, measured by log K_{ow}, exceeds 0.

[0034] In some embodiments, the hydrophobicity of the double-stranded RNAi agent, measured by the unbound fraction in a plasma protein binding assay of the double-stranded RNAi agent, exceeds 0.2. In a related embodiment, the plasma protein binding assay is an electrophoretic mobility shift assay using human serum albumin protein.

[0035] In certain embodiments, substantially all of the nucleotides of the sense strand are modified nucleotides. Optionally, all of the nucleotides of the sense strand are modified nucleotides.

[0036] In some embodiments, substantially all of the nucleotides of the antisense strand are modified nucleotides. Optionally, all of the nucleotides of the antisense strand are modified nucleotides.

[0037] Optionally, all of the nucleotides of the sense strand and all of the nucleotides of the antisense strand are modified nucleotides.

[0038] In one embodiment, at least one of the modified nucleotides is a deoxy-nucleotide, a 3′-terminal deoxythimidine (dT) nucleotide, a 2′-O-methyl modified nucleotide, a 2′-fluoro modified nucleotide, a 2′-deoxy-modified nucleotide, a locked nucleotide, an unlocked nucleotide, a conformationally restricted nucleotide, a constrained ethyl nucleotide, an abasic nucleotide, a 2′-amino-modified nucleotide, a 2′-O-allyl-modified nucleotide, 2′-C-alkyl-modified nucleotide, 2′-hydroxly-modified nucleotide, a 2′-methoxyethyl modified nucleotide, a 2′-O-alkyl-modified nucleotide, a morpholino nucleotide, a phosphoramidate, a non-natural base comprising nucleotide, a tetrahydropyran modified nucleotide, a 1,5-anhydrohexitol modified nucleotide, a cyclohexenyl modified nucleotide, a nucleotide comprising a 5′-phosphorothioate group, a nucleotide comprising a 5′-methylphosphonate group, a nucleotide comprising a 5′ phosphate or 5′ phosphate mimic, a nucleotide comprising vinyl phosphonate, a nucleotide comprising adenosine-glycol nucleic acid (GNA), a nucleotide comprising thymidine-glycol nucleic acid (GNA) S-Isomer, a nucleotide comprising 2-hydroxymethyl-tetrahydrofurane-5-phosphate, a nucleotide comprising 2′-deoxythymidine-3′phosphate, a nucleotide comprising 2′-deoxyguanosine-3′-phosphate, a nucleotide comprising a 2′ phosphate, e.g., G2p, C2p, A2p, U2p, or a terminal nucleotide linked to a cholesteryl derivative or a dodecanoic acid bisdecylamide group.

[0039] In a related embodiment, the modified nucleotide is a 2′-deoxy-2′-fluoro modified nucleotide, a 2′-deoxy-modified nucleotide, 3′-terminal deoxythimidine nucleotides (dT), a locked nucleotide, an abasic nucleotide, a 2′-amino-modified nucleotide, a 2′-alkyl-modified nucleotide, a morpholino nucleotide, a phosphoramidate, or a non-natural base comprising nucleotide.

[0040] In one embodiment, the modified nucleotide includes a short sequence of 3′-terminal deoxythimidine nucleotides (dT).

[0041] In another embodiment, the modifications on the nucleotides are 2′-O-methyl, 2′fluoro, and GNA modifications.

[0042] In an additional embodiment, the double stranded RNAi agent includes at least one phosphorothioate internucleotide linkage. Optionally, the double stranded RNAi agent includes 6-8 (e.g., 6, 7, or 8) phosphorothioate internucleotide linkages.

[0043] In certain embodiments, the region of complementarity is at least 17 nucleotides in length.

[0044] Optionally, the region of complementarity is 19-23 nucleotides in length. Optionally, the region of complementarity is 19 nucleotides in length.

[0045] In one embodiment, each strand is no more than 30 nucleotides in length.

[0046] In another embodiment, at least one strand includes a 3′ overhang of at least 1 nucleotide. Optionally, at least one strand includes a 3′ overhang of at least 2 nucleotides.

[0047] In certain embodiments, the double stranded RNAi agent further includes a lipophilic ligand, e.g., a C16 ligand, conjugated to the 3′ end of the sense strand through a monovalent or branched bivalent or trivalent linker. In certain embodiments, the double stranded RNAi agent further includes a lipophilic ligand, e.g., a C16 ligand, conjugated to an internal nucleotide positon, e.g., through a monovalent or branched bivalent or trivalent linker.

[0048] In certain embodiments, the ligand is a C16 ligand. In one embodiment, the ligand is conjugated at the 2′-position of a nucleotide or modified nucleotide within the sense or antisense strand.

[0049] For example, a C16 ligand may be conjugated as shown in the following structure:

[chemical structure]

where * denotes a bond to an adjacent nucleotide, and B is a nucleobase or a nucleobase analog, optionally where B is adenine, guanine, cytosine, thymine or uracil.

[0050] In other embodiments, the agent further comprises a targeting ligand that targets a liver tissue, e.g., one or more GalNAc derivatives, optionally conjugated to the double stranded RNAi agent via a linker or carrier. In certain embodiments, one of the modified strands in Tables 3 and 5 are conjugated to a targeting ligand that targets a liver tissue. In certain embodiments, the targeting ligand is an L96 ligand, e.g., one or more GalNAc derivatives, optionally conjugated to the double stranded RNAi agent via a linker or carrier. In certain embodiments, the L96 ligand is conjugated to the end of one of the strands. In certain embodiments the L96 ligand is conjugated to the 3′ end of the sense strand.

[0051] In yet other embodiments, the agents further comprise a lipophilic ligand, e.g., a C16 ligand, conjugated to an internal nucleotide position, e.g., through a monovalent or branched bivalent or trivalent linker, and a targeting ligand that targets a liver tissue, e.g., one or more GalNAc derivatives conjugated to the 3′ end of the sense strand through a monovalent or branched bivalent or trivalent linker.

[0052] In yet other embodiments, the agents further comprise a lipophilic ligand, e.g., a C16 ligand, conjugated to the 3′ end of the sense strand through a monovalent or branched bivalent or trivalent linker and a targeting ligand that targets a liver tissue, e.g., one or more GalNAc derivatives conjugated to the 3′ end of the sense strand through a monovalent or branched bivalent or trivalent linker.

[0053] In another embodiment, the region of complementarity to GSK3α includes any one of the antisense sequences in any one of Tables 2-5 and 8-9.

[0054] In an additional embodiment, the region of complementarity to GSK3α is that of any one of the antisense sequences in any one of Tables 2-5 and 8-9. In some embodiments, the internal nucleotide positions include all positions except the terminal two positions from each end of the strand.

[0055] In a related embodiment, the internal positions include all positions except terminal three positions from each end of the strand. Optionally, the internal positions exclude the cleavage site region of the sense strand.

[0056] In some embodiments, the internal positions exclude positions 9-12, counting from the 5′-end of the sense strand. In certain embodiments, the sense strand is 21 nucleotides in length.

[0057] In other embodiments, the internal positions exclude positions 11-13, counting from the 3′-end of the sense strand. Optionally, the internal positions exclude the cleavage site region of the antisense strand. In certain embodiments, the sense strand is 21 nucleotides in length.

[0058] In some embodiments, the internal positions exclude positions 12-14, counting from the 5′-end of the antisense strand. In certain embodiments, the antisense strand is 23 nucleotides in length.

[0059] In another embodiment, the internal positions exclude positions 11-13 on the sense strand, counting from the 3′-end, and positions 12-14 on the antisense strand, counting from the 5′-end. In certain embodiments, the sense strand is 21 nucleotides in length and the antisense strand is 23 nucleotides in length.

[0060] In an additional embodiment, one or more lipophilic moieties are conjugated to one or more of the following internal positions: positions 4-8 and 13-18 on the sense strand, and positions 6-10 and 15-18 on the antisense strand, counting from the 5′end of each strand. Optionally, one or more lipophilic moieties are conjugated to one or more of the following internal positions: positions 5, 6, 7, 15, and 17 on the sense strand, and positions 15 and 17 on the antisense strand, counting from the 5′-end of each strand. In certain embodiments, the sense strand is 21 nucleotides in length and the antisense strand is 23 nucleotides in length.

[0061] In certain embodiments, the lipophilic moiety is an aliphatic, alicyclic, or polyalicyclic compound. Optionally, the lipophilic moiety is lipid, cholesterol, retinoic acid, cholic acid, adamantane acetic acid, 1-pyrene butyric acid, dihydrotestosterone, 1,3-bis-O(hexadecyl)glycerol, geranyloxyhexyanol, hexadecylglycerol, borneol, menthol, 1,3-propanediol, heptadecyl group, palmitic acid, myristic acid, 03-(oleoyl)lithocholic acid, 03-(oleoyl)cholenic acid, dimethoxytrityl, or phenoxazine.

[0062] In some embodiments, the lipophilic moiety contains a saturated or unsaturated C₄-C₃₀ hydrocarbon chain, and an optional functional group selected that is hydroxyl, amine, carboxylic acid, sulfonate, phosphate, thiol, azide, or alkyne.

[0063] In certain embodiments, the lipophilic moiety contains a saturated or unsaturated C₆-C₁₈ hydrocarbon chain. Optionally, the lipophilic moiety contains a saturated or unsaturated C₁₆ hydrocarbon chain. In a related embodiment, the lipophilic moiety is conjugated via a carrier that replaces one or more nucleotide(s) in the internal position(s). In certain embodiments, the carrier is a cyclic group that is pyrrolidinyl, pyrazolinyl, pyrazolidinyl, imidazolinyl, imidazolidinyl, piperidinyl, piperazinyl, [1,3]dioxolanyl, oxazolidinyl, isoxazolidinyl, morpholinyl, thiazolidinyl, isothiazolidinyl, quinoxalinyl, pyridazinonyl, tetrahydrofuranyl, or decalinyl; or is an acyclic moiety based on a serinol backbone or a diethanolamine backbone.

[0064] In some embodiments, the lipophilic moiety is conjugated to the double-stranded RNAi agent via a linker containing an ether, thioether, urea, carbonate, amine, amide, maleimide-thioether, disulfide, phosphodiester, sulfonamide linkage, a product of a click reaction, or carbamate.

[0065] In one embodiment, the lipophilic moiety is conjugated to a nucleobase, sugar moiety, or internucleosidic linkage.

[0066] In another embodiment, the double-stranded RNAi agent further includes a phosphate or phosphate mimic at the 5′-end of the antisense strand. Optionally, the phosphate mimic is a 5′-vinyl phosphonate (VP). When the phosphate mimic is a 5′-vinyl phosphonate (VP), the 5′-terminal nucleotide may have the following structure,

[chemical structure]

[0067] wherein X is O or S;
[0068] R is hydrogen, hydroxy, fluoro, or C₁₋₂₀alkoxy (e.g., methoxy or n-hexadecyloxy);
[0069] R^{5′} is ═C(H)—P(O)(OH)₂ and the double bond between the C5′ carbon and R5′ is in the E or Z orientation (e.g., E orientation); and
[0070] B is a nucleobase or a modified nucleobase, optionally where B is adenine, guanine, cytosine, thymine, or uracil.

[0071] In certain embodiments, the double-stranded RNAi agent further includes a targeting ligand that targets a receptor which mediates delivery to a CNS tissue, e.g., a hydrophilic ligand. In certain embodiments, the targeting ligand is a C16 ligand.

[0072] In some embodiments, the double-stranded RNAi agent further includes a targeting ligand that targets a brain tissue, e.g., striatum.

[0073] In some embodiments, the double-stranded RNAi agent further includes a targeting ligand that targets a liver tissue or cell type, e.g., hepatocytes.

[0074] In one embodiment, the lipophilic moeity or targeting ligand is conjugated via a bio-cleavable linker that is DNA, RNA, disulfide, amide, functionalized monosaccharides or oligosaccharides of galactosamine, glucosamine, glucose, galactose, mannose, or a combination thereof.

[0075] In a related embodiment, the 3′ end of the sense strand is protected via an end cap which is a cyclic group having an amine, the cyclic group being pyrrolidinyl, pyrazolinyl, pyrazolidinyl, imidazolinyl, imidazolidinyl, piperidinyl, piperazinyl, [1,3]dioxolanyl, oxazolidinyl, isoxazolidinyl, morpholinyl, thiazolidinyl, isothiazolidinyl, quinoxalinyl, pyridazinonyl, tetrahydrofuranyl, or decalinyl.

[0076] In one embodiment, the RNAi agent includes at least one modified nucleotide that is a 2′-O-methyl modified nucleotide, a 2′-fluoro modified nucleotide, a nucleotide that includes a glycol nucleic acid (GNA) or a nucleotide that includes a vinyl phosphonate. Optionally, the RNAi agent includes at least one of each of the following modifications: 2′-O-methyl modified nucleotide, a 2′-fluoro modified nucleotide, a nucleotide comprising a glycol nucleic acid (GNA) and a nucleotide comprising vinyl phosphonate.

[0077] In another embodiment, the RNAi agent includes a pattern of modified nucleotides as provided below in Tables 2-5 and 8-9 where locations of 2′-C16, 2′-O-methyl, GNA, phosphorothioate, and 2′-fluoro modifications, irrespective of the individual nucleotide base sequences of the displayed RNAi agents.

[0078] Another aspect of the instant disclosure provides a double stranded RNAi agent for inhibiting expression of a GSK3α gene, wherein the double stranded RNAi agent includes a sense strand complementary to an antisense strand, wherein the antisense strand includes a region complementary to part of an mRNA encoding GSK3α, wherein each strand is about 14 to about 30 nucleotides in length, wherein the double stranded RNAi agent is represented by formula (III):

sense: 5′nₚ-Nₐ—(XXX)ᵢ—N_{b}—YYY—N_{b}—(ZZZ)ⱼ—Nₐ-n_{q}3′

antisense: 3′nₚ′—Nₐ′—(X′X′X′)ₖ—N_{b}′—Y′Y′Y′—N_{b}′—(Z′Z′Z′)₁—Nₐ′-n_{q}′5′ (III)
[0079] wherein:
[0080] i, j, k, and l are each independently 0 or 1;
[0081] p, p′, q, and q′ are each independently 0-6;
[0082] each Nₐ and Nₐ′ independently represents an oligonucleotide sequence including 0-25 nucleotides which are either modified or unmodified or combinations thereof, each sequence including at least two differently modified nucleotides;
[0083] each N_{b} and N_{b}′ independently represents an oligonucleotide sequence including 0-10 nucleotides which are either modified or unmodified or combinations thereof;
[0084] each nₚ, nₚ′, n_{q}, and n_{q}′, each of which may or may not be present, independently represents an overhang nucleotide;
[0085] XXX, YYY, ZZZ, X′X′X′, Y′Y′Y′, and Z′Z′Z′ each independently represent one motif of three identical modifications on three consecutive nucleotides;
   modifications on N_{b} differ from the modification on Y and modifications on N_{b}′ differ from the modification on Y′; and
[0086] wherein the sense strand is conjugated to at least one ligand.

[0087] In one embodiment, i is 0; j is 0; i is 1; j is 1; both i and j are 0; or both i and j are 1.

[0088] In another embodiment, k is 0; l is 0; k is 1; l is 1; both k and l are 0; or both k and l are 1.

[0089] In certain embodiments, XXX is complementary to X′X′X′, YYY is complementary to Y′Y′Y′, and ZZZ is complementary to Z′Z′Z′.

[0090] In another embodiment, the YYY motif occurs at or near the cleavage site of the sense strand.

[0091] In an additional embodiment, the Y′Y′Y′ motif occurs at the 11, 12 and 13 positions of the antisense strand from the 5′-end. Optionally, the Y′ is 2′-O-methyl.

[0092] In some embodiments, formula (III) is represented by formula (IIIa):

sense: 5′nₚ-Nₐ—YYY—Nₐ-n_{q}3′

antisense: 3′nₚ-Nₐ′—Y′Y′Y′—Nₐ′-n_{q}′5′ (IIIa).

[0093] In another embodiment, formula (III) is represented by formula (IIIb):

sense: 5′nₚ-Nₐ—YYY—N_{b}—ZZZ—Nₐ-n_{q}3′

antisense: 3′nₚ-Nₐ′—Y′Y′Y′—N_{b}′—Z′Z′Z′—Nₐ′-n_{q}′5′ (IIb)
[0094] wherein each N_{b} and N_{b}′ independently represents an oligonucleotide sequence including 1-5 modified nucleotides.

[0095] In an additional embodiment, formula (III) is represented by formula (IIIc):

sense: 5′n-Nₐ—XXX—N_{b}—YYY—Nₐ-n_{q}3′

antisense: 3′nₚ′—Nₐ′—X′X′X′—N_{b}′—Y′Y′Y′—Nₐ′-n_{q}′5′ (IIc)
[0096] wherein each N_{b} and N_{b}′ independently represents an oligonucleotide sequence including 1-5 modified nucleotides.

[0097] In certain embodiments, formula (III) is represented by formula (IIId):

sense: 5′nₚ-Nₐ—XXX—N_{b}—YYY—N_{b}—ZZZ—Nₐ-n_{q}3′

antisense: 3′nₚ′—Nₐ′—X′X′X′—N_{b}′—Y′Y′Y′—N_{b}′—Z′Z′Z′—Nₐ′-n_{q}′5′ (IIId)
[0098] wherein each N_{b} and N_{b}′ independently represents an oligonucleotide sequence including 1-5 modified nucleotides and each Nₐ and Nₐ′ independently represents an oligonucleotide sequence including 2-10 modified nucleotides.

[0099] In another embodiment, the double stranded region is 15-30 nucleotide pairs in length. Optionally, the double stranded region is 17-23 nucleotide pairs in length.

[0100] In certain embodiments, the double stranded region is 17-25 nucleotide pairs in length. Optionally, the double stranded region is 23-27 nucleotide pairs in length.

[0101] In some embodiments, the double stranded region is 19-21 nucleotide pairs in length. Optionally, the double stranded region is 21-23 nucleotide pairs in length.

[0102] In certain embodiments, each strand independently has 15-30 nucleotides. Optionally, each strand independently has 19-30 nucleotides. Optionally, each strand independently has 19-23 nucleotides.

[0103] In certain embodiments, the double stranded region is 19-21 nucleotide pairs in length and each strand has 19-23 nucleotides.

[0104] In another embodiment, the modifications on the nucleotides of the RNAi agent are LNA, glycol nucleic acid (GNA), hexitol nucleic acid (HNA), a cyclohexene nucleic acid (CeNA), 2′-methoxyethyl, 2′-O-alkyl, 2′-O-allyl, 2′-C-allyl, 2′-fluoro, 2′-deoxy or 2′-hydroxyl, and combinations thereof. Optionally, the modifications on nucleotides include 2′-O-methyl, 2′-fluoro, or GNA, and combinations thereof. In a related embodiment, the modifications on the nucleotides are 2′-O-methyl or 2′-fluoro modifications.

[0105] In one embodiment the RNAi agent includes a ligand that is or includes one or more lipophilic, e.g., C16, moieties attached through a bivalent or trivalent branched linker.

[0106] In other embodiments, the agent further comprises a targeting ligand that targets a liver tissue, e.g., one or more GalNAc derivatives.

[0107] In yet other embodiments, the agents further comprise a lipophilic ligand, e.g., a C16 ligand, conjugated to the 3′ end of the sense strand through a monovalent or branched bivalent or trivalent linker and a targeting ligand that targets a liver tissue, e.g., one or more GalNAc derivatives conjugated to the 3′ end of the sense strand through a monovalent or branched bivalent or trivalent linker.

[0108] In certain embodiments, the ligand is attached to the 3′ end of the sense strand.

[0109] In some embodiments, the RNAi agent further includes at least one phosphorothioate or methylphosphonate internucleotide linkage. In a related embodiment, the phosphorothioate or methylphosphonate internucleotide linkage is at the 3′-terminus of one strand. Optionally, the strand is the antisense strand. In another embodiment, the strand is the sense strand. In a related embodiment, the phosphorothioate or methylphosphonate internucleotide linkage is at the 5′-terminus of one strand. Optionally, the strand is the antisense strand. In another embodiment, the strand is the sense strand.

[0110] In another embodiment, the phosphorothioate or methylphosphonate internucleotide linkage is at the both the 5′- and 3′-terminus of one strand. Optionally, the strand is the antisense strand. In another embodiment, the strand is the sense strand.

[0111] In an additional embodiment, the base pair at the 1 position of the 5′-end of the antisense strand of the RNAi agent duplex is an A:U base pair.

[0112] In certain embodiments, the Y nucleotides contain a 2′-fluoro modification.

[0113] In some embodiments, the Y′ nucleotides contain a 2′-O-methyl modification.

[0114] In certain embodiments, p′>0. Optionally, p′=2.

[0115] In some embodiments, q′=0, p=0, q=0, and p′ overhang nucleotides are complementary to the target mRNA.

[0116] In certain embodiments, q′=0, p=0, q=0, and p′ overhang nucleotides are non-complementary to the target mRNA.

[0117] In one embodiment, the sense strand of the RNAi agent has a total of 21 nucleotides and the antisense strand has a total of 23 nucleotides.

[0118] In another embodiment, at least one nₚ′ is linked to a neighboring nucleotide via a phosphorothioate linkage. Optionally, all nₚ′ are linked to neighboring nucleotides via phosphorothioate linkages.

[0119] In certain embodiments, the GSK3α RNAi agent of the instant disclosure is one of those listed in Tables 2-5 and 8-9. In some embodiments, all of the nucleotides of the sense strand and all of the nucleotides of the antisense strand include a modification.

[0120] Another aspect of the instant disclosure provides a double stranded RNAi agent for inhibiting expression of a GSK3α gene in a cell, wherein the double stranded RNAi agent includes a sense strand complementary to an antisense strand, wherein the antisense strand includes a region complementary to part of an mRNA encoding a GSK3α gene, wherein each strand is about 14 to about 30 nucleotides in length, wherein the double stranded RNAi agent is represented by formula (III):

sense: 5′nₚ-Nₐ—(XXX)i-N_{b}—YYY—N_{b}—(ZZZ)ⱼ—Nₐ-n_{q}3′

antisense: 3′nₚ′—Nₐ′—(X′X′X′)ₖ—N_{b}′—Y′Y′Y′—N_{b}′—(Z′Z′Z′)₁—Nₐ′-n_{q}′5′ (III)
[0121] wherein:
[0122] i, j, k, and l are each independently 0 or 1;
[0123] p, p′, q, and q′ are each independently 0-6;
[0124] each Nₐ and Nₐ′ independently represents an oligonucleotide sequence including 0-25 nucleotides which are either modified or unmodified or combinations thereof, each sequence including at least two differently modified nucleotides;
[0125] each N_{b} and N_{b}′ independently represents an oligonucleotide sequence including 0-10 nucleotides which are either modified or unmodified or combinations thereof;
[0126] each nₚ, nₚ′, n_{q}, and n_{q}′, each of which may or may not be present independently represents an overhang nucleotide;
[0127] XXX, YYY, ZZZ, X′X′X′, Y′Y′Y′, and Z′Z′Z′ each independently represent one motif of three identical modifications on three consecutive nucleotides, and wherein the modifications are 2′-O-methyl or 2′-fluoro modifications;
[0128] modifications on N_{b} differ from the modification on Y and modifications on N_{b}′ differ from the modification on Y′; and
[0129] wherein the sense strand is conjugated to at least one ligand, optionally wherein the ligand is one or more lipophilic, e.g., C16, ligands, or one or more GalNAc derivatives.

[0130] An additional aspect of the instant disclosure provides a double stranded RNAi agent for inhibiting expression of a GSK3α gene in a cell, wherein the double stranded RNAi agent includes a sense strand complementary to an antisense strand, wherein the antisense strand includes a region complementary to part of an mRNA encoding GSK3α, wherein each strand is about 14 to about 30 nucleotides in length, wherein the double stranded RNAi agent is represented by formula (III):

sense: 5′n-Nₐ—(XXX)i-N_{b}—YYY—N_{b}—(ZZZ)ⱼ—Nₐ-n_{q}3′

antisense: 3′nₚ′—Nₐ′—(X′X′X′)ₖ—N_{b}′—Y′Y′Y′—N_{b}′—(Z′Z′Z′)₁—Nₐ′-n_{q}′5′ (III)
[0131] wherein:
[0132] i, j, k, and l are each independently 0 or 1;
[0133] each nₚ, n_{q}, and n_{q}′, each of which may or may not be present, independently represents an overhang nucleotide;
[0134] p, q, and q′ are each independently 0-6;
[0135] nₚ′>0 and at least one nₚ′ is linked to a neighboring nucleotide via a phosphorothioate linkage;
[0136] each Nₐ and Nₐ′ independently represents an oligonucleotide sequence including 0-25 nucleotides which are either modified or unmodified or combinations thereof, each sequence including at least two differently modified nucleotides;
[0137] each N_{b} and N_{b}′ independently represents an oligonucleotide sequence including 0-10 nucleotides which are either modified or unmodified or combinations thereof;
[0138] XXX, YYY, ZZZ, X′X′X′, Y′Y′Y′, and Z′Z′Z′ each independently represent one motif of three identical modifications on three consecutive nucleotides, and wherein the modifications are 2′-O-methyl, glycol nucleic acid (GNA) or 2′-fluoro modifications;
[0139] modifications on N_{b} differ from the modification on Y and modifications on N_{b}′ differ from the modification on Y′; and
[0140] wherein the sense strand is conjugated to at least one ligand, optionally where the ligand is one or more lipophilic, e.g., C16, ligands, or one or more GalNAc derivatives.

[0141] Another aspect of the instant disclosure provides a double stranded RNAi agent for inhibiting expression of a GSK3α gene in a cell, wherein the double stranded RNAi agent includes a sense strand complementary to an antisense strand, wherein the antisense strand includes a region complementary to part of an mRNA encoding GSK3α (SEQ ID NO: 1, or a nucleotide sequence having at least 90% nucleotide sequence identity, e.g. 90, 91, 92, 93, 94, 95, 96, 97, 98, 99 or 100% identity, to the entire nucleotide sequence of SEQ ID NO:1), wherein each strand is about 14 to about 30 nucleotides in length, wherein the double stranded RNAi agent is represented by formula (III):

sense: 5′nₚ-Nₐ—(XXX)i-N_{b}—YYY—N_{b}—(ZZZ)ⱼ—Nₐ-n_{q}3′

antisense: 3′nₚ′—Nₐ′—(X′X′X′)ₖ—N_{b}′—Y′Y′Y′—N_{b}′—(Z′Z′Z′)₁—Nₐ′-n_{q}′5′ (III)
[0142] wherein:
[0143] i, j, k, and l are each independently 0 or 1;
[0144] each nₚ, n_{q}, and n_{q}′, each of which may or may not be present, independently represents an overhang nucleotide;
[0145] p, q, and q′ are each independently 0-6;
[0146] nₚ′>0 and at least one nₚ′ is linked to a neighboring nucleotide via a phosphorothioate linkage;
[0147] each Nₐ and Nₐ′ independently represents an oligonucleotide sequence including 0-25 nucleotides which are either modified or unmodified or combinations thereof, each sequence including at least two differently modified nucleotides;
[0148] each N_{b} and N_{b}′ independently represents an oligonucleotide sequence including 0-10 nucleotides which are either modified or unmodified or combinations thereof;
[0149] XXX, YYY, ZZZ, X′X′X′, Y′Y′Y′, and Z′Z′Z′ each independently represent one motif of three identical modifications on three consecutive nucleotides, and wherein the modifications are 2′-O-methyl or 2′-fluoro modifications;
[0150] modifications on N_{b} differ from the modification on Y and modifications on N_{b}′ differ from the modification on Y′; and
[0151] wherein the sense strand is conjugated to at least one ligand, optionally wherein the ligand is one or more lipophilic, e.g., C16, ligands, or one or more GalNAc derivatives.

[0152] An additional aspect of the instant disclosure provides a double stranded RNAi agent for inhibiting expression of a GSK3α gene in a cell, wherein the double stranded RNAi agent includes a sense strand complementary to an antisense strand, wherein the antisense strand includes a region complementary to part of an mRNA encoding GSK3α (SEQ ID NO: 1, or a nucleotide sequence having at least 90% nucleotide sequence identity, e.g. 90, 91, 92, 93, 94, 95, 96, 97, 98, 99, or 100% identity, to the entire nucleotide sequence of SEQ ID NO: 1), wherein each strand is about 14 to about 30 nucleotides in length, wherein the double stranded RNAi agent is represented by formula (III):

sense: 5′nₚ-Nₐ—(XXX)ᵢ—N_{b}—YYY—N_{b}—(ZZZ)ⱼ—Nₐ-n_{q}3′

antisense: 3′nₚ′—Nₐ′—(X′X′X′)ₖ—N_{b}′—Y′Y′Y′—N_{b}′—(Z′Z′Z′)₁—Nₐ′-n_{q}′5′ (III)
[0153] wherein:
[0154] i, j, k, and l are each independently 0 or 1;
[0155] each nₚ, n_{q}, and n_{q}′, each of which may or may not be present, independently represents an overhang nucleotide;
[0156] p, q, and q′ are each independently 0-6;
[0157] nₚ′>0 and at least one nₚ′ is linked to a neighboring nucleotide via a phosphorothioate linkage;
[0158] each Nₐ and Nₐ′ independently represents an oligonucleotide sequence including 0-25 nucleotides which are either modified or unmodified or combinations thereof, each sequence including at least two differently modified nucleotides;
[0159] each N_{b} and N_{b}′ independently represents an oligonucleotide sequence including 0-10 nucleotides which are either modified or unmodified or combinations thereof;
[0160] XXX, YYY, ZZZ, X′X′X′, Y′Y′Y′, and Z′Z′Z′ each independently represent one motif of three identical modifications on three consecutive nucleotides, and wherein the modifications are 2′-O-methyl or 2′-fluoro modifications;
[0161] modifications on N_{b} differ from the modification on Y and modifications on N_{b}′ differ from the modification on Y′;
[0162] wherein the sense strand includes at least one phosphorothioate linkage; and
[0163] wherein the sense strand is conjugated to at least one ligand, optionally wherein the ligand is one or more lipophilic, e.g., C16, ligands or one or more GalNAc derivatives.

[0164] Another aspect of the instant disclosure provides a double stranded RNAi agent for inhibiting expression of a GSK3α gene in a cell, wherein the double stranded RNAi agent includes a sense strand complementary to an antisense strand, wherein the antisense strand includes a region complementary to part of an mRNA encoding GSK3α (SEQ ID NO: 1, or a nucleotide sequence having at least 90% nucleotide sequence identity, e.g. 90, 91, 92, 93, 94, 95, 96, 97, 98, 99, or 100% identity, to the entire nucleotide sequence of SEQ ID NO: 1), wherein each strand is about 14 to about 30 nucleotides in length, wherein the double stranded RNAi agent is represented by formula (III):

sense: 5′nₚ-Nₐ—YYY—Nₐ-n_{q}3′

antisense: 3′nₚ′—Nₐ′—Y′Y′Y′—Nₐ′-n_{q}′5′ (IIIa)
[0165] wherein:
[0166] each nₚ, n_{q}, and n_{q}′, each of which may or may not be present, independently represents an overhang nucleotide;
[0167] p, q, and q′ are each independently 0-6;
[0168] nₚ′>0 and at least one nₚ′ is linked to a neighboring nucleotide via a phosphorothioate linkage;
[0169] each Nₐ and Nₐ′ independently represents an oligonucleotide sequence including 0-25 nucleotides which are either modified or unmodified or combinations thereof, each sequence including at least two differently modified nucleotides;
[0170] YYY and Y′Y′Y′ each independently represent one motif of three identical modifications on three consecutive nucleotides, and wherein the modifications are 2′-O-methyl or 2′-fluoro modifications;
[0171] wherein the sense strand includes at least one phosphorothioate linkage; and
[0172] wherein the sense strand is conjugated to at least one ligand, optionally wherein the ligand is one or more lipophilic, e.g., C16 ligands, or one or more GalNAc derivatives.

[0173] An additional aspect of the instant disclosure provides a double stranded RNAi agent for inhibiting expression of a GSK3α gene, wherein the double stranded RNAi agent targeted to GSK3α includes a sense strand and an antisense strand forming a double stranded region, wherein the sense strand includes at least 15 contiguous nucleotides differing by no more than 3 nucleotides (i.e., differing by 3, 2, 1, or 0 nucleotides) from any one of the nucleotide sequences of SEQ ID NOs: 1, 3, 5, and 7, or a nucleotide sequence having at least 90% nucleotide sequence identity, e.g. 90, 91, 92, 93, 94, 95, 96, 97, 98, 99, or 100% identity, to the entire nucleotide sequence of any one of SEQ ID NOs: 1, 3, 5, or 7, and the antisense strand includes at least 15 contiguous nucleotides differing by no more than 3 nucleotides (i.e., differing by 3, 2, 1, or 0 nucleotides) from any one of the nucleotide sequences of SEQ ID NOs: 2, 4, 6, and 8, or a nucleotide sequence having at least 90% nucleotide sequence identity, e.g. 90, 91, 92, 93, 94, 95, 96, 97, 98, 99, or 100% identity, to the entire nucleotide sequence of any one of SEQ ID NOs: 2, 4, 6, and 8; wherein a substitution of a uracil for any thymine in the sequences provided in the SEQ ID NOs: 1-8 (when comparing aligned sequences) does not count as a difference that contributes to the differing by no more than 3 nucleotides from any one of the nucleotide sequences provided in SEQ ID NOs: 1-8, wherein substantially all of the nucleotides of the sense strand include a modification that is a 2′-O-methyl modification, a GNA, or a 2′-fluoro modification, wherein the sense strand includes two phosphorothioate internucleotide linkages at the 5′-terminus, wherein substantially all of the nucleotides of the antisense strand include a modification selected from the group consisting of a 2′-O-methyl modification and a 2′-fluoro modification, wherein the antisense strand includes two phosphorothioate internucleotide linkages at the 5′-terminus and two phosphorothioate internucleotide linkages at the 3′-terminus, and wherein the sense strand is conjugated to one or more lipophilic, e.g., C16, ligands, optionally, further comprising a liver targeting ligand, e.g., a ligand comprising one or more GalNAc derivatives.

[0174] Another aspect of the instant disclosure provides a double stranded RNAi agent for inhibiting expression of a GSK3α gene, wherein the double stranded RNAi agent targeted to GSK3α includes a sense strand and an antisense strand forming a double stranded region, wherein the sense strand includes at least 15 contiguous nucleotides differing by no more than 3 nucleotides (i.e., differing by 3, 2, 1, or 0 nucleotides) from any one of the nucleotide sequences of SEQ ID NOs: 1, 3, 5, and 7, or a nucleotide sequence having at least 90% nucleotide sequence identity, e.g. 90, 91, 92, 93, 94, 95, 96, 97, 98, 99, or 100% identity, to the entire nucleotide sequence of any one of SEQ ID NOs: 1, 3, 5, or 7, and the antisense strand includes at least 15 contiguous nucleotides differing by no more than 3 nucleotides (i.e., differing by 3, 2, 1, or 0 nucleotides) from any one of the nucleotide sequences of SEQ ID NOs: 2, 4, 6, and 8, or a nucleotide sequence having at least 90% nucleotide sequence identity, e.g. 90, 91, 92, 93, 94, 95, 96, 97, 98, 99, or 100% identity, to the entire nucleotide sequence of any one of SEQ ID NOs: 2, 4, 6, and 8, wherein a substitution of a uracil for any thymine in the sequences provided in the SEQ ID NOs: 1-8 (when comparing aligned sequences) does not count as a difference that contributes to the differing by no more than 3 nucleotides from any one of the nucleotide sequences provided in SEQ ID NOs:1-8; wherein the sense strand includes at least one 3′-terminal deoxythimidine nucleotide (dT), and wherein the antisense strand includes at least one 3′-terminal deoxythimidine nucleotide (dT).

[0175] In one embodiment, all of the nucleotides of the sense strand and all of the nucleotides of the antisense strand are modified nucleotides.

[0176] In another embodiment, each strand has 19-30 nucleotides.

[0177] In certain embodiments, the antisense strand of the RNAi agent includes at least one thermally destabilizing modification of the duplex within the first 9 nucleotide positions of the 5′ region or a precursor thereof. Optionally, the thermally destabilizing modification of the duplex is one or more of

[chemical structure]

wherein B is nucleobase.

[0178] Another aspect of the instant disclosure provides a cell containing a double stranded RNAi agent of the instant disclosure.

[0179] An additional aspect of the instant disclosure provides a pharmaceutical composition for inhibiting expression of a GSK3α gene that includes a double stranded RNAi agent of the instant disclosure.

[0180] In one embodiment, the double stranded RNAi agent is administered in an unbuffered solution. Optionally, the unbuffered solution is saline or water.

[0181] In another embodiment, the double stranded RNAi agent is administered with a buffer solution. Optionally, the buffer solution includes acetate, citrate, prolamine, carbonate, or phosphate or any combination thereof. In another embodiment, the buffer solution is phosphate buffered saline (PBS).

[0182] Another aspect of the disclosure provides a pharmaceutical composition that includes a double stranded RNAi agent of the instant disclosure and a lipid formulation.

[0183] In one embodiment, the lipid formulation includes a lipid nanoparticle (LNP).

[0184] An additional aspect of the disclosure provides a method of inhibiting expression of a GSK3α gene in a cell, the method involving: (a) contacting the cell with a double stranded RNAi agent of the instant disclosure or a pharmaceutical composition of of the instant disclosure; and (b) maintaining the cell produced in step (a) for a time sufficient to obtain degradation of the mRNA transcript of a GSK3α gene, thereby inhibiting expression of the GSK3α gene in the cell.

[0185] In one embodiment, the cell is within a subject. Optionally, the subject is a human.

[0186] In certain embodiments, the subject is a rhesus monkey, a cynomolgous monkey (also known as a crab-eating macaque), a mouse, dog, or a rat.

[0187] In certain embodiments, the human subject suffers from a GSK3α-associated neurodegenerative disease, e.g., fragile X syndrome (FXS).

[0188] In certain embodiments, the method further involves administering an additional therapeutic agent or therapy to the subject. Exemplary additional therapeutics and treatments include, for example, sedatives, antidepressants, clonazepam, sodium valproate, opiates, antiepileptic drugs, cholinesterase inhibitors, memantine, benzodiazepines, levodopa, COMT inhibitors (e.g., tolcapone and entacapone), dopamine agonists (e.g., bromocriptine, pergolide, pramipexole, ropinirole, piribedil, cabergoline, apomorphine and lisuride), MAO-B inhibitors (e.g., safinamide, selegiline and rasagiline), amantadine, an anticholinergic, modafinil, pimavanserin, doxepin, rasagline, an antipsychotic, an atypical antipsychotic (e.g., amisulpride, olanzapine, risperidone, and clozapine), riluzole, edaravone, deep brain stimulation, non-invasive ventilation (NIV), invasive ventilation physical therapy, occupational therapy, speech therapy, dietary changes and swallowing technique a feeding tube, a PEG tube, probiotics, and psychological therapy.

[0189] In certain embodiments, the double stranded RNAi agent is administered at a dose of about 0.01 mg/kg to about 50 mg/kg.

[0190] In some embodiments, the double stranded RNAi agent is administered to the subject intrathecally.

[0191] In one embodiment, the method reduces the expression of a GSK3α gene in a brain (e.g., striatum) or spine tissue. Optionally, the brain or spine tissue is striatum, frontal cortex, temporal cortex, cerebellum, hippocampus, cervical spine, lumbar spine, or thoracic spine.

[0192] In one embodiment, the method reduces the expression of a GSK3α gene in an eye (with or without lens), heart, kidney, liver, lung and/or muscle tissue or cell.

[0193] In some embodiments, the double stranded RNAi agent is administered to the subject subcutaneously.

[0194] In some embodiments, the double stranded RNAi agent is administered to the subject intracerebroventricularly.

[0195] In some embodiments, the double stranded RNAi agent is administered to the subject intrathecally.

[0196] In one embodiment, the method reduces the expression of a GSK3α gene in the liver.

[0197] In other embodiments, the method reduces the expression of a GSK3α gene in the liver and the brain.

[0198] Another aspect of the instant disclosure provides a method of inhibiting the expression of GSK3α in a subject, the method involving: administering to the subject a therapeutically effective amount of a double stranded RNAi agent of the disclosure or a pharmaceutical composition of the disclosure, thereby inhibiting the expression of GSK3α in the subject.

[0199] An additional aspect of the disclosure provides a method for treating or preventing a disorder or GSK3α-associated neurodegenerative disease or disorder in a subject, the method involving administering to the subject a therapeutically effective amount of a double stranded RNAi agent of the disclosure or a pharmaceutical composition of the disclosure, thereby treating or preventing a GSK3α-associated neurodegenerative disease or disorder in the subject.

[0200] In certain embodiments, the GSK3α-associated neurodegenerative disease or disorder is fragile X syndrome (FXS).

[0201] Another aspect of the instant disclosure provides a kit for performing a method of the instant disclosure, the kit including: a) a double stranded RNAi agent of the instant disclosure, and b) instructions for use, and c) optionally, a device for administering the double stranded RNAi agent to the subject.

[0202] An additional aspect of the instant disclosure provides a double stranded ribonucleic acid (RNAi) agent for inhibiting expression of a GSK3α gene, wherein the RNAi agent possesses a sense strand and an antisense strand, and wherein the antisense strand includes a region of complementarity which includes at least 15 contiguous nucleotides differing by no more than 3 nucleotides (i.e., differing by 3, 2, 1, or 0 nucleotides), e.g., at least 15 nucleotides (i.e., differing by 3, 2, 1, or 0 nucleotides), at least 19 nucleotides (i.e., differing by 3, 2, 1, or 0 nucleotides), from any one of the antisense strand nucleobase sequences of Tables 2-5 and 8-9. In one embodiment, the RNAi agent includes one or more of the following modifications: a 2′-O-methyl modified nucleotide, a 2′-fluoro modified nucleotide, a 2′-C-alkyl-modified nucleotide, a nucleotide comprising a glycol nucleic acid (GNA), a phosphorothioate (PS) and a vinyl phosphonate (VP). Optionally, the RNAi agent includes at least one of each of the following modifications: a 2′-O-methyl modified nucleotide, a 2′-fluoro modified nucleotide, a 2′-C-alkyl-modified nucleotide, a nucleotide comprising a glycol nucleic acid (GNA), a phosphorothioate and a vinyl phosphonate (VP).

[0203] In another embodiment, the RNAi agent includes four or more PS modifications, optionally six to ten PS modifications, optionally eight PS modifications.

[0204] In an additional embodiment, each of the sense strand and the antisense strand of the RNAi agent possesses a 5′-terminus and a 3′-terminus, and the RNAi agent includes eight PS modifications positioned at each of the penultimate and ultimate internucleotide linkages from the respective 3′- and 5′-termini of each of the sense and antisense strands of the RNAi agent.

[0205] In another embodiment, each of the sense strand and the antisense strand of the RNAi agent includes a 5′-terminus and a 3′-terminus, and the RNAi agent includes only one nucleotide including a GNA. Optionally, the nucleotide including a GNA is positioned on the antisense strand at the seventh nucleobase residue from the 5′-terminus of the antisense strand.

[0206] In an additional embodiment, each of the sense strand and the antisense strand of the RNAi agent includes a 5′-terminus and a 3′-terminus, and the RNAi agent includes one to four 2′-C-alkyl-modified nucleotides. Optionally, the 2′-C-alkyl-modified nucleotide is a 2′-C16-modified nucleotide. Optionally, the RNAi agent includes a single 2′-C-alkyl, e.g., C16-modified nucleotide. Optionally, the single 2′-C-alkyl, e.g., C16-modified nucleotide is located on the sense strand at the sixth nucleobase position from the 5′-terminus of the sense strand.

[0207] In another embodiment, each of the sense strand and the antisense strand of the RNAi agent includes a 5′-terminus and a 3′-terminus, and the RNAi agent includes two or more 2′-fluoro modified nucleotides. Optionally, each of the sense strand and the antisense strand of the RNAi agent includes two or more 2′-fluoro modified nucleotides. Optionally, the 2′-fluoro modified nucleotides are located on the sense strand at nucleobase positions 7, 9, 10, and 11 from the 5′-terminus of the sense strand and on the antisense strand at nucleobase positions 2, 14, and 16 from the 5′-terminus of the antisense strand.

[0208] In an additional embodiment, each of the sense strand and the antisense strand of the RNAi agent includes a 5′-terminus and a 3′-terminus, and the RNAi agent includes one or more VP modifications. Optionally, the RNAi agent includes a single VP modification at the 5′-terminus of the antisense strand.

[0209] In another embodiment, each of the sense strand and the antisense strand of the RNAi agent includes a 5′-terminus and a 3′-terminus, and the RNAi agent includes two or more 2′-O-methyl modified nucleotides. Optionally, the RNAi agent includes 2′-O-methyl modified nucleotides at all nucleobase locations not modified by a 2′-fluoro, a 2′-C-alkyl or a glycol nucleic acid (GNA). Optionally, the two or more 2′-O-methyl modified nucleotides are located on the sense strand at positions 1, 2, 3, 4, 5, 8, 12, 13, 14, 15, 16, 17, 18, 19, 20, and 21 from the 5′-terminus of the sense strand and on the antisense strand at positions 1, 3, 4, 5, 6, 8, 9, 10, 11, 12, 13, 15, 17, 18, 19, 20, 21, 22 and 23 from the 5′-terminus of the antisense strand.

[0210] In another embodiment, the RNAi agent is a pharmaceutically acceptable salt thereof. “Pharmaceutically acceptable salts” of each of RNAi agents herein include, but are not limited to, a sodium salt, a calcium salt, a lithium salt, a potassium salt, an ammonium salt, a magnesium salt, an mixtures thereof. One skilled in the art will appreciate that the RNAi agent, when provided as a polycationic salt having one cation per free acid group of the optionally modified phosophodiester backbone and/or any other acidic modifications (e.g., 5′-terminal phosphonate groups). For example, an oligonucleotide of “n” nucleotides in length contains n−1 optionally modified phosophodiesters, so that an oligonucleotide of 21 nt in length may be provided as a salt having up to 20 cations (e.g., 20 sodium cations). Similarly, an RNAi agents having a sense strand of 21 nt in length and an antisense strand of 23 nt in length may be provided as a salt having up to 42 cations (e.g., 42 sodium cations). In the preceding example, where the RNAi agent also includes a 5′-terminal phosphate or a 5′-terminal vinylphosphonate group, the RNAi agent may be provided as a salt having up to 44 cations (e.g., 44 sodium cations).

[0211] The present invention also provide an RNA-induced silencing complex (RISC) comprising an antisense strand of any of the dsRNA agents of the present invention.

[0212] The present invention is further illustrated by the following detailed description and FIGURES.

### BRIEF DESCRIPTION OF THE FIGURE

[0213] FIG. 1 depicts the GSK3α and GSK3β mRNA levels in mice (n=3 per group) subcutaneously administered a single 10 mg/kg dose of the indicated dsRNA duplexes on day14 post-dose. GSK3α and GSK3β mRNA levels are shown relative to control levels detected with PBS treatment.

### DETAILED DESCRIPTION OF THE INVENTION

[0214] The present disclosure provides RNAi compositions, which effect the RNA-induced silencing complex (RISC)-mediated cleavage of RNA transcripts of a GSK3α gene. The GSK3α gene may be within a cell, e.g., a cell within a subject, such as a human. The present disclosure also provides methods of using the RNAi compositions of the disclosure for inhibiting the expression of a GSK3α gene or for treating a subject having a disorder that would benefit from inhibiting or reducing the expression of a GSK3α gene, e.g., a GSK3α-associated neurodegenerative disease, e.g., fragile X syndrome (FXS).

[0215] The RNAi agents of the disclosure include an RNA strand (the antisense strand) having a region which is about 30 nucleotides or less in length, e.g., 15-30, 15-29, 15-28, 15-27, 15-26, 15-25, 15-24, 15-23, 15-22, 15-21, 15-20, 15-19, 15-18, 15-17, 18-30, 18-29, 18-28, 18-27, 18-26, 18-25, 18-24, 18-23, 18-22, 18-21, 18-20, 19-30, 19-29, 19-28, 19-27, 19-26, 19-25, 19-24, 19-23, 19-22, 19-21, 19-20, 20-30, 20-29, 20-28, 20-27, 20-26, 20-25, 20-24,20-23, 20-22, 20-21, 21-30, 21-29, 21-28, 21-27, 21-26, 21-25, 21-24, 21-23, or 21-22 nucleotides in length, which region is substantially complementary to at least part of an mRNA transcript of a GSK3α gene. In certain embodiments, the RNAi agents of the disclosure include an RNA strand (the antisense strand) having a region which is about 21-23 nucleotides in length, which region is substantially complementary to at least part of an mRNA transcript of a GSK3α gene.

[0216] In certain embodiments, the RNAi agents of the disclosure include an RNA strand (the antisense strand) which can include longer lengths, for example up to 66 nucleotides, e.g., 36-66, 26-36, 25-36, 31-60, 22-43, 27-53 nucleotides in length with a region of at least 19 contiguous nucleotides that is substantially complementary to at least a part of an mRNA transcript of a GSK3α gene. These RNAi agents with the longer length antisense strands can, for example, include a second RNA strand (the sense strand) of 20-60 nucleotides in length wherein the sense and antisense strands form a duplex of 18-30 contiguous nucleotides.

[0217] The use of these RNAi agents enables the targeted degradation of mRNAs of a GSK3α gene in mammals. Thus, methods and compositions including these RNAi agents are useful for treating a subject who would benefit by a reduction in the levels or activity of a GSK3α protein, such as a subject having a GSK3α-associated neurodegenerative disease, e.g., fragile X syndrome (FXS).

[0218] The following detailed description discloses how to make and use compositions containing RNAi agents to inhibit the expression of a GSK3α gene, as well as compositions and methods for treating subjects having diseases and disorders that would benefit from inhibition or reduction of the expression of the genes.

### I. Definitions

[0219] In order that the present disclosure may be more readily understood, certain terms are first defined. In addition, it should be noted that whenever a value or range of values of a parameter are recited, it is intended that values and ranges intermediate to the recited values are also intended to be part of this disclosure.

[0220] The articles “a” and “an” are used herein to refer to one or to more than one (i.e., to at least one) of the grammatical object of the article. By way of example, “an element” means one element or more than one element, e.g., a plurality of elements.

[0221] The term “including” is used herein to mean, and is used interchangeably with, the phrase “including but not limited to”.

[0222] The term “or” is used herein to mean, and is used interchangeably with, the term “and/or,” unless context clearly indicates otherwise.

[0223] The term “about” is used herein to mean within the typical ranges of tolerances in the art. For example, “about” can be understood as about 2 standard deviations from the mean. In certain embodiments, about means±10%. In certain embodiments, about means±5%. When about is present before a series of numbers or a range, it is understood that “about” can modify each of the numbers in the series or range.

[0224] The term “at least”, “no less than”, or “or more” prior to a number or series of numbers is understood to include the number adjacent to the term “at least”, and all subsequent numbers or integers that could logically be included, as clear from context. For example, the number of nucleotides in a nucleic acid molecule must be an integer. For example, “at least 18 nucleotides of a 21 nucleotide nucleic acid molecule” means that 18, 19, 20, or 21 nucleotides have the indicated property. When at least is present before a series of numbers or a range, it is understood that “at least” can modify each of the numbers in the series or range.

[0225] As used herein, “no more than” or “or less” is understood as the value adjacent to the phrase and logical lower values or intergers, as logical from context, to zero. For example, a duplex with an overhang of “no more than 2 nucleotides” has a 2, 1, or 0 nucleotide overhang. When “no more than” is present before a series of numbers or a range, it is understood that “no more than” can modify each of the numbers in the series or range. As used herein, ranges include both the upper and lower limit.

[0226] As used herein, methods of detection can include determination that the amount of analyte present is below the level of detection of the method.

[0227] In the event of a conflict between an indicated target site and the nucleotide sequence for a sense or antisense strand, the indicated sequence takes precedence.

[0228] In the event of a conflict between a chemical structure and a chemical name, the chemical structure takes precedence.

[0229] As used herein, the term “Glycogen Synthase Kinase 3 alpha,” used interchangeably with the term “GSK3α,” refers to the well-known gene and polypeptide, also known in the art as Serine/Threonine-Protein Kinase GSK3A, EC 2.7.11.26, GSK-3 Alpha, EC 2.7.11.1, or EC 2.7.11. The term “GSK3α” includes human GSK3α, the amino acid and nucleotide sequence of which may be found in, for example, GenBank Accession No. NM_019884.3; (GI: 1519241808; SEQ ID NO:3); mouse GSK3α, the amino acid and nucleotide sequence of which may be found in, for example, GenBank Accession No. NM_001031667.1 (GI: 72384360; SEQ ID NO:1); Macaca fascicularis (crab-eating macaque, also known as cynomolgus monkey) GSK3α, the amino acid and nucleotide sequence of which may be found in, for example, GenBank Accession No. XM_005589395.2 (GI: 982316806; SEQ ID NO:5); and rat GSK3α, the amino acid and nucleotide sequence of which may be found in, for example, GenBank Accession No. NM_017344.2 (GI: 1937882592; SEQ ID NO:7).

[0230] Additional examples of GSK3α mRNA sequences are readily available using, e.g., GenBank, UniProt, OMIM, and the Macaca genome project web site.

[0231] Exemplary GSK3α nucleotide sequences may also be found in SEQ ID NOs:1-8. SEQ ID NOs: 2, 4, 6 and 8 are the reverse complement sequences of SEQ ID NOs: 1, 3, 5 and 7, respectively.

[0232] Further information on GSK3α is provided, for example in the NCBI Gene database at www.ncbi.nlm.nih.gov/gene/2931.

[0233] The entire contents of each of the foregoing GenBank Accession numbers and the Gene database numbers are incorporated herein by reference as of the date of filing this application.

[0234] The terms “Glycogen Synthase Kinase 3 alpha” and “GSK3α,” as used herein, also refers to naturally occurring DNA sequence variations of the GSK3α gene. Numerous sequence variations within the GSK3α gene have been identified and may be found at, for example, NCBI dbSNP and UniProt (see, e.g., www.ncbi.nlm.nih.gov/snp?LinkName=gene_snp&from_uid=2931, the entire contents of which is incorporated herein by reference as of the date of filing this application.

[0235] As used herein, “target sequence” refers to a contiguous portion of the nucleotide sequence of an mRNA molecule formed during the transcription of a GSK3α gene, including mRNA that is a product of RNA processing of a primary transcription product. In one embodiment, the target portion of the sequence will be at least long enough to serve as a substrate for RNAi-directed cleavage at or near that portion of the nucleotide sequence of an mRNA molecule formed during the transcription of a GSK3α gene. In one embodiment, the target sequence is within the protein coding region of the GSK3α gene. In another embodiment, the target sequence is within the 3′ UTR of the GSK3α gene.

[0236] The target sequence may be from about 9-36 nucleotides in length, e.g., about 15-30 nucleotides in length. For example, the target sequence can be from about 15-30 nucleotides, 15-29, 15-28, 15-27, 15-26, 15-25, 15-24, 15-23, 15-22, 15-21, 15-20, 15-19, 15-18, 15-17, 18-30, 18-29, 18-28, 18-27, 18-26, 18-25, 18-24, 18-23, 18-22, 18-21, 18-20, 19-30, 19-29, 19-28, 19-27, 19-26, 19-25, 19-24, 19-23, 19-22, 19-21, 19-20, 20-30, 20-29, 20-28, 20-27, 20-26, 20-25, 20-24,20-23, 20-22, 20-21, 21-30, 21-29, 21-28, 21-27, 21-26, 21-25, 21-24, 21-23, or 21-22 nucleotides in length. In some embodiments, the target sequence is about 19 to about 30 nucleotides in length. In other embodiments, the target sequence is about 19 to about 25 nucleotides in length. In still other embodiments, the target sequence is about 19 to about 23 nucleotides in length. In some embodiments, the target sequence is about 21 to about 23 nucleotides in length. Ranges and lengths intermediate to the above recited ranges and lengths are also contemplated to be part of the invention.

[0237] As used herein, the term “strand comprising a sequence” refers to an oligonucleotide comprising a chain of nucleotides that is described by the sequence referred to using the standard nucleotide nomenclature.

[0238] “G,” “C,” “A,” “T”, and “U” each generally stand for a nucleotide that contains guanine, cytosine, adenine, thymidine, and uracil as a base, respectively in the context of a modified or unmodified nucleotide. However, it will be understood that the term “ribonucleotide” or “nucleotide” can also refer to a modified nucleotide, as further detailed below, or a surrogate replacement moiety (see, e.g., Table 1). The skilled person is well aware that guanine, cytosine, adenine, thymidine, and uracil can be replaced by other moieties without substantially altering the base pairing properties of an oligonucleotide comprising a nucleotide bearing such replacement moiety. For example, without limitation, a nucleotide comprising inosine as its base can base pair with nucleotides containing adenine, cytosine, or uracil. Hence, nucleotides containing uracil, guanine, or adenine can be replaced in the nucleotide sequences of dsRNA featured in the disclosure by a nucleotide containing, for example, inosine. In another example, adenine and cytosine anywhere in the oligonucleotide can be replaced with guanine and uracil, respectively to form G-U Wobble base pairing with the target mRNA. Sequences containing such replacement moieties are suitable for the compositions and methods featured in the disclosure.

[0239] The terms “iRNA”, “RNAi agent,” “iRNA agent,” “RNA interference agent” as used interchangeably herein, refer to an agent that contains RNA as that term is defined herein, and which mediates the targeted cleavage of an RNA transcript via an RNA-induced silencing complex (RISC) pathway. RNA interference (RNAi) is a process that directs the sequence-specific degradation of mRNA. RNAi modulates, e.g., inhibits, the expression of GSK3α in a cell, e.g., a cell within a subject, such as a mammalian subject.

[0240] In one embodiment, an RNAi agent of the disclosure includes a single stranded RNAi that interacts with a target RNA sequence, e.g., a GSK3α target mRNA sequence, to direct the cleavage of the target RNA. Without wishing to be bound by theory it is believed that long double stranded RNA introduced into cells is broken down into double-stranded short interfering RNAs (siRNAs) comprising a sense strand and an antisense strand by a Type III endonuclease known as Dicer (Sharp et al. (2001) Genes Dev. 15:485). Dicer, a ribonuclease-III-like enzyme, processes these dsRNA into 19-23 base pair short interfering RNAs with characteristic two base 3′ overhangs (Bernstein, et al., (2001) Nature 409:363). These siRNAs are then incorporated into an RNA-induced silencing complex (RISC) where one or more helicases unwind the siRNA duplex, enabling the complementary antisense strand to guide target recognition (Nykanen, et al., (2001) Cell 107:309). Upon binding to the appropriate target mRNA, one or more endonucleases within the RISC cleave the target to induce silencing (Elbashir, et al., (2001) Genes Dev. 15:188). Thus, in one aspect the disclosure relates to a single stranded RNA (ssRNA) (the antisense strand of a siRNA duplex) generated within a cell and which promotes the formation of a RISC complex to effect silencing of the target gene, i.e., a GSK3α gene. Accordingly, the term “siRNA” is also used herein to refer to an RNAi as described above.

[0241] In another embodiment, the RNAi agent may be a single-stranded RNA that is introduced into a cell or organism to inhibit a target mRNA. Single-stranded RNAi agents bind to the RISC endonuclease, Argonaute 2, which then cleaves the target mRNA. The single-stranded siRNAs are generally 15-30 nucleotides and are chemically modified. The design and testing of single-stranded RNAs are described in U.S. Pat. No. 8,101,348 and in Lima et al., (2012) Cell 150:883-894, the entire contents of each of which are hereby incorporated herein by reference. Any of the antisense nucleotide sequences described herein may be used as a single-stranded siRNA as described herein or as chemically modified by the methods described in Lima et al., (2012) Cell 150:883-894.

[0242] In another embodiment, a “RNAi agent” for use in the compositions and methods of the disclosure is a double stranded RNA and is referred to herein as a “double stranded RNAi agent,” “double stranded RNA (dsRNA) molecule,” “dsRNA agent,” or “dsRNA”. The term “dsRNA” refers to a complex of ribonucleic acid molecules, having a duplex structure comprising two anti-parallel and substantially complementary nucleic acid strands, referred to as having “sense” and “antisense” orientations with respect to a target RNA, i.e., a GSK3α gene. In some embodiments of the disclosure, a double stranded RNA (dsRNA) triggers the degradation of a target RNA, e.g., an mRNA, through a post-transcriptional gene-silencing mechanism referred to herein as RNA interference or RNAi.

[0243] In general, a dsRNA molecule can include ribonucleotides, but as described in detail herein, each or both strands can also include one or more non-ribonucleotides, e.g., a deoxyribonucleotide, a modified nucleotide. In addition, as used in this specification, an “RNAi agent” may include ribonucleotides with chemical modifications; an RNAi agent may include substantial modifications at multiple nucleotides.

[0244] As used herein, the term “modified nucleotide” refers to a nucleotide having, independently, a modified sugar moiety, a modified internucleotide linkage, or a modified nucleobase. Thus, the term modified nucleotide encompasses substitutions, additions or removal of, e.g., a functional group or atom, to internucleoside linkages, sugar moieties, or nucleobases. The modifications suitable for use in the agents of the disclosure include all types of modifications disclosed herein or known in the art. Any such modifications, as used in a siRNA type molecule, are encompassed by “RNAi agent” for the purposes of this specification and claims.

[0245] In certain embodiments of the instant disclosure, inclusion of a deoxy-nucleotide—which is acknowledged as a naturally occurring form of nucleotide—if present within a RNAi agent can be considered to constitute a modified nucleotide.

[0246] The duplex region may be of any length that permits specific degradation of a desired target RNA through a RISC pathway, and may range from about 9 to 36 base pairs in length, e.g., about 15-30 base pairs in length, for example, about 9, 10, 11, 12, 13, 14, 15, 16, 17, 18, 19, 20, 21, 22, 23, 24, 25, 26, 27, 28, 29, 30, 31, 32, 33, 34, 35, or 36 base pairs in length, such as about 15-30, 15-29, 15-28, 15-27, 15-26, 15-25, 15-24, 15-23, 15-22, 15-21, 15-20, 15-19, 15-18, 15-17, 18-30, 18-29, 18-28, 18-27, 18-26, 18-25, 18-24, 18-23, 18-22, 18-21, 18-20, 19-30, 19-29, 19-28, 19-27, 19-26, 19-25, 19-24, 19-23, 19-22, 19-21, 19-20, 20-30, 20-29, 20-28, 20-27, 20-26, 20-25, 20-24,20-23, 20-22, 20-21, 21-30, 21-29, 21-28, 21-27, 21-26, 21-25, 21-24, 21-23, or 21-22 base pairs in length. Ranges and lengths intermediate to the above recited ranges and lengths are also contemplated to be part of the invention.

[0247] The two strands forming the duplex structure may be different portions of one larger RNA molecule, or they may be separate RNA molecules. Where the two strands are part of one larger molecule, and therefore are connected by an uninterrupted chain of nucleotides between the 3′-end of one strand and the 5′-end of the respective other strand forming the duplex structure, the connecting RNA chain is referred to as a “hairpin loop.” A hairpin loop can comprise at least one unpaired nucleotide. In some embodiments, the hairpin loop can comprise at at least 4, at least 5, at least 6, at least 7, at least 8, at least 9, at least 10, at least 20, at least 23 or more unpaired nucleotides or nucleotides not directed to the target site of the dsRNA. In some embodiments, the hairpin loop can be 10 or fewer nucleotides. In some embodiments, the hairpin loop can be 8 or fewer unpaired nucleotides. In some embodiments, the hairpin loop can be 4-10 unpaired nucleotides. In some embodiments, the hairpin loop can be 4-8 nucleotides.

[0248] In certain embodiment, the two strands of double-stranded oligomeric compound can be linked together. The two strands can be linked to each other at both ends, or at one end only. By linking at one end is meant that 5′-end of first strand is linked to the 3′-end of the second strand or 3′-end of first strand is linked to 5′-end of the second strand. When the two strands are linked to each other at both ends, 5′-end of first strand is linked to 3′-end of second strand and 3′-end of first strand is linked to 5′-end of second strand. The two strands can be linked together by an oligonucleotide linker including, but not limited to, (N)n; wherein N is independently a modified or unmodified nucleotide and n is 3-23. In some embodiments, n is 3-10, e.g., 3, 4, 5, 6, 7, 8, 9, or 10. In some embodiments, the oligonucleotide linker is selected from the group consisting of GNRA, (G)4, (U)4, and (dT)4, wherein N is a modified or unmodified nucleotide and R is a modified or unmodified purine nucleotide. Some of the nucleotides in the linker can be involved in base-pair interactions with other nucleotides in the linker. The two strands can also be linked together by a non-nucleosidic linker, e.g. a linker described herein. It will be appreciated by one of skill in the art that any oligonucleotide chemical modifications or variations describe herein can be used in the oligonucleotide linker.

[0249] Hairpin and dumbbell type oligomeric compounds will have a duplex region equal to or at least 14, 15, 15, 16, 17, 18, 19, 29, 21, 22, 23, 24, or 25 nucleotide pairs. The duplex region can be equal to or less than 200, 100, or 50, in length. In some embodiments, ranges for the duplex region are 15-30, 17 to 23, 19 to 23, and 19 to 21 nucleotides pairs in length.

[0250] The hairpin oligomeric compounds can have a single strand overhang or terminal unpaired region, in some embodiments at the 3′, and in some embodiments on the antisense side of the hairpin. In some embodiments, the overhangs are 1-4, more generally 2-3 nucleotides in length. The hairpin oligomeric compounds that can induce RNA interference are also referred to as “shRNA” herein.

[0251] Where the two substantially complementary strands of a dsRNA are comprised by separate RNA molecules, those molecules need not, but can be covalently connected. Where the two strands are connected covalently by means other than an uninterrupted chain of nucleotides between the 3′-end of one strand and the 5′-end of the respective other strand forming the duplex structure, the connecting structure is referred to as a “linker.” The RNA strands may have the same or a different number of nucleotides. The maximum number of base pairs is the number of nucleotides in the shortest strand of the dsRNA minus any overhangs that are present in the duplex. In addition to the duplex structure, an RNAi may comprise one or more nucleotide overhangs.

[0252] In one embodiment, an RNAi agent of the invention is a dsRNA, each strand of which is 24-30 nucleotides in length, that interacts with a target RNA sequence, e.g., a GSK3α target mRNA sequence, to direct the cleavage of the target RNA. Without wishing to be bound by theory, long double stranded RNA introduced into cells is broken down into siRNA by a Type III endonuclease known as Dicer (Sharp et al. (2001) Genes Dev. 15:485). Dicer, a ribonuclease-III-like enzyme, processes the dsRNA into 19-23 base pair short interfering RNAs with characteristic two base 3′ overhangs (Bernstein, et al., (2001) Nature 409:363). The siRNAs are then incorporated into an RNA-induced silencing complex (RISC) where one or more helicases unwind the siRNA duplex, enabling the complementary antisense strand to guide target recognition (Nykanen, et al., (2001) Cell 107:309). Upon binding to the appropriate target mRNA, one or more endonucleases within the RISC cleave the target to induce silencing (Elbashir, et al., (2001) Genes Dev. 15:188).

[0253] In one embodiment, an RNAi agent of the invention is a dsRNA agent, each strand of which comprises 19-23 nucleotides that interacts with a GSK3α RNA sequence to direct the cleavage of the target RNA. Without wishing to be bound by theory, long double stranded RNA introduced into cells is broken down into siRNA by a Type III endonuclease known as Dicer (Sharp et al. (2001) Genes Dev. 15:485). Dicer, a ribonuclease-III-like enzyme, processes the dsRNA into 19-23 base pair short interfering RNAs with characteristic two base 3′ overhangs (Bernstein, et al., (2001) Nature 409:363). The siRNAs are then incorporated into an RNA-induced silencing complex (RISC) where one or more helicases unwind the siRNA duplex, enabling the complementary antisense strand to guide target recognition (Nykanen, et al., (2001) Cell 107:309). Upon binding to the appropriate target mRNA, one or more endonucleases within the RISC cleave the target to induce silencing (Elbashir, et al., (2001) Genes Dev. 15:188). In one embodiment, an RNAi agent of the invention is a dsRNA of 24-30 nucleotides that interacts with a GSK3α RNA sequence to direct the cleavage of the target RNA.

[0254] As used herein, the term “nucleotide overhang” refers to at least one unpaired nucleotide that protrudes from the duplex structure of a RNAi agent, e.g., a dsRNA. For example, when a 3′-end of one strand of a dsRNA extends beyond the 5′-end of the other strand, or vice versa, there is a nucleotide overhang. A dsRNA can comprise an overhang of at least one nucleotide; alternatively, the overhang can comprise at least two nucleotides, at least three nucleotides, at least four nucleotides, at least five nucleotides or more. A nucleotide overhang can comprise or consist of a nucleotide/nucleoside analog, including a deoxynucleotide/nucleoside. The overhang(s) can be on the sense strand, the antisense strand or any combination thereof. Furthermore, the nucleotide(s) of an overhang can be present on the 5′-end, 3′-end or both ends of either an antisense or sense strand of a dsRNA.

[0255] In one embodiment, the antisense strand of a dsRNA has a 1-10 nucleotide, e.g., a 1, 2, 3, 4, 5, 6, 7, 8, 9, or 10 nucleotide, overhang at the 3′-end or the 5′-end. In one embodiment, the sense strand of a dsRNA has a 1-10 nucleotide, e.g., a 1, 2, 3, 4, 5, 6, 7, 8, 9, or 10 nucleotide, overhang at the 3′-end or the 5′-end. In another embodiment, one or more of the nucleotides in the overhang is replaced with a nucleoside thiophosphate.

[0256] In certain embodiments, the antisense strand of a dsRNA has a 1-10 nucleotide, e.g., 0-3, 1-3, 2-4, 2-5, 4-10, 5-10, e.g., a 1, 2, 3, 4, 5, 6, 7, 8, 9, or 10 nucleotide, overhang at the 3′-end or the 5′-end. In one embodiment, the sense strand of a dsRNA has a 1-10 nucleotide, e.g., a 1, 2, 3, 4, 5, 6, 7, 8, 9, or 10 nucleotide, overhang at the 3′-end or the 5′-end. In another embodiment, one or more of the nucleotides in the overhang is replaced with a nucleoside thiophosphate.

[0257] In certain embodiments, the overhang on the sense strand or the antisense strand, can include extended lengths longer than 10 nucleotides, e.g., 1-30 nucleotides, 2-30 nucleotides, 10-30 nucleotides, or 10-15 nucleotides in length. In certain embodiments, an extended overhang is on the sense strand of the duplex. In certain embodiments, an extended overhang is present on the 3′end of the sense strand of the duplex. In certain embodiments, an extended overhang is present on the 5′end of the sense strand of the duplex. In certain embodiments, an extended overhang is on the antisense strand of the duplex. In certain embodiments, an extended overhang is present on the 3′end of the antisense strand of the duplex. In certain embodiments, an extended overhang is present on the 5′end of the antisense strand of the duplex. In certain embodiments, one or more of the nucleotides in the overhang is replaced with a nucleoside thiophosphate. In certain embodiments, the overhang includes a self-complementary portion such that the overhang is capable of forming a hairpin structure that is stable under physiological conditions.

[0258] In certain embodiments, at least one end of at least one strand is extended beyond a duplex targeting region, including structures where one of the strands includes a thermodynamically-stabilizing tetraloop structure (see, e.g., U.S. Pat. Nos. 8,513,207 and 8,927,705, as well as WO2010033225, the entire contents of each of which are incorporated by reference herein). Such structures may include single-stranded extensions (on one or both sides of the molecule) as well as double-stranded extensions.

[0259] In certain embodiments, the 3′ end of the sense strand and the 5′ end of the antisense strand are joined by a polynucleotide sequence comprising ribonucleotides, deoxyribonucleotides or both, optionally wherein the polynucleotide sequence comprises a tetraloop sequence. In certain embodiments, the sense strand is 25-35 nucleotides in length.

[0260] A tetraloop may contain ribonucleotides, deoxyribonucleotides, modified nucleotides, and combinations thereof. Typically, a tetraloop has 4 to 5 nucleotides. In some embodiments, the loop comprises a sequence set forth as GAAA. In some embodiments, at least one of the nucleotide of the loop (GAAA) comprises a nucleotide modification. In some embodiments, the modified nucleotide comprises a 2′-modification. In some embodiments, the 2′-modification is a modification selected from the group consisting of 2′-aminoethyl, 2′-fluoro, 2′-O-methyl, 2′-O-methoxyethyl, 2′-aminodiethoxymethanol, 2′-adem, and 2′-deoxy-2′-fhioro-d-arabinonucleic acid. In some embodiments, all of the nucleotides of the loop are modified. In some embodiments, the G in the GAAA sequence comprises a 2′-OH. In some embodiments, each of the nucleotides in the GAAA sequence comprises a 2′-O-methyl modification. In some embodiments, each of the A in the GAAA sequence comprises a 2′-OH and the G in the GAAA sequence comprises a 2′-O-methyl modification. In some embodiments, each of the A in the GAAA sequence comprises a 2′-O-methoxyethyl (MOE) modification and the G in the GAAA sequence comprises a 2′-O-methyl modification; or each of the A in the GAAA sequence comprises a 2′-adem modification and the G in the GAAA sequence comprises a 2′-O-methyl modification. See, e.g., PCT Publication No. WO 2020/206350, the entire contents of which are incorporated herein by reference.

[0261] An exemplary 2′adem modified nucleotide is shown below:

[chemical structure]

[0262] In one embodiment of the dsRNA, at least one strand comprises a 3′ overhang of at least 1 nucleotide. In another embodiment, at least one strand comprises a 3′ overhang of at least 2 nucleotides, e.g., 2, 3, 4, 5, 6, 7, 9, 10, 11, 12, 13, 14, or 15 nucleotides. In other embodiments, at least one strand of the RNAi agent comprises a 5′ overhang of at least 1 nucleotide. In certain embodiments, at least one strand comprises a 5′ overhang of at least 2 nucleotides, e.g., 2, 3, 4, 5, 6, 7, 9, 10, 11, 12, 13, 14, or 15 nucleotides. In still other embodiments, both the 3′ and the 5′ end of one strand of the RNAi agent comprise an overhang of at least 1 nucleotide.

[0263] In one embodiment, the antisense strand of a dsRNA has a 1-10 nucleotide, e.g., 0-3, 1-3, 2-4, 2-5, 4-10, 5-10, e.g., a 1, 2, 3, 4, 5, 6, 7, 8, 9, or 10 nucleotide, overhang at the 3′-end or the 5′-end. In one embodiment, the sense strand of a dsRNA has a 1-10 nucleotide, e.g., a 1, 2, 3, 4, 5, 6, 7, 8, 9, or 10 nucleotide, overhang at the 3′-end or the 5′-end. In another embodiment, one or more of the nucleotides in the overhang is replaced with a nucleoside thiophosphate.

[0264] In certain embodiments, the overhang on the sense strand or the antisense strand, or both, can include extended lengths longer than 10 nucleotides, e.g., 1-30 nucleotides, 2-30 nucleotides, 10-30 nucleotides, or 10-15 nucleotides in length. In certain embodiments, an extended overhang is on the sense strand of the duplex. In certain embodiments, an extended overhang is present on the 3′end of the sense strand of the duplex. In certain embodiments, an extended overhang is present on the 5′end of the sense strand of the duplex. In certain embodiments, an extended overhang is on the antisense strand of the duplex. In certain embodiments, an extended overhang is present on the 3′end of the antisense strand of the duplex. In certain embodiments, an extended overhang is present on the 5′end of the antisense strand of the duplex. In certain embodiments, one or more of the nucleotides in the overhang is replaced with a nucleoside thiophosphate. In certain embodiments, the overhang includes a self-complementary portion such that the overhang is capable of forming a hairpin structure that is stable under physiological conditions.

[0265] The terms “blunt” or “blunt ended” as used herein in reference to a dsRNA mean that there are no unpaired nucleotides or nucleotide analogs at a given terminal end of a dsRNA, i.e., no nucleotide overhang. One or both ends of a dsRNA can be blunt. Where both ends of a dsRNA are blunt, the dsRNA is said to be blunt ended. To be clear, a “blunt ended” dsRNA is a dsRNA that is blunt at both ends, i.e., no nucleotide overhang at either end of the molecule. Most often such a molecule will be double stranded over its entire length.

[0266] The term “antisense strand” or “guide strand” refers to the strand of a RNAi agent, e.g., a dsRNA, which includes a region that is substantially complementary to a target sequence, e.g., a GSK3α mRNA.

[0267] As used herein, the term “region of complementarity” refers to the region on the antisense strand that is substantially complementary to a sequence, for example, a target sequence, e.g., a GSK3α nucleotide sequence, as defined herein. Where the region of complementarity is not fully complementary to the target sequence, the mismatches can be in the internal or terminal regions of the molecule. Generally, the most tolerated mismatches are in the terminal regions, e.g., within 5, 4, 3, or 2 nucleotides of the 5′- or 3′-terminus of the RNAi agent.

[0268] In some embodiments, a double stranded RNA agent of the invention includes a nucleotide mismatch in the antisense strand. In some embodiments, the antisense strand of the double stranded RNA agent of the invention includes no more than 4 mismatches with the target mRNA, e.g., the antisense strand includes 4, 3, 2, 1, or 0 mismatches with the target mRNA. In some embodiments, the antisense strand double stranded RNA agent of the invention includes no more than 4 mismatches with the sense strand, e.g., the antisense strand includes 4, 3, 2, 1, or 0 mismatches with the sense strand. In some embodiments, a double stranded RNA agent of the invention includes a nucleotide mismatch in the sense strand. In some embodiments, the sense strand of the double stranded RNA agent of the invention includes no more than 4 mismatches with the antisense strand, e.g., the sense strand includes 4, 3, 2, 1, or 0 mismatches with the antisense strand. In some embodiments, the nucleotide mismatch is, for example, within 5, 4, 3 nucleotides from the 3′-end of the iRNA. In another embodiment, the nucleotide mismatch is, for example, in the 3′-terminal nucleotide of the iRNA agent. In some embodiments, the mismatch(s) is not in the seed region.

[0269] Thus, an RNAi agent as described herein can contain one or more mismatches to the target sequence. In one embodiment, a RNAi agent as described herein contains no more than 3 mismatches (i.e., 3, 2, 1, or 0 mismatches). In one embodiment, an RNAi agent as described herein contains no more than 2 mismatches. In one embodiment, an RNAi agent as described herein contains no more than 1 mismatch. In one embodiment, an RNAi agent as described herein contains 0 mismatches. In certain embodiments, if the antisense strand of the RNAi agent contains mismatches to the target sequence, the mismatch can optionally be restricted to be within the last 5 nucleotides from either the 5′- or 3′-end of the region of complementarity. For example, in such embodiments, for a 23 nucleotide RNAi agent, the strand which is complementary to a region of a GSK3α gene, generally does not contain any mismatch within the central 13 nucleotides. The methods described herein or methods known in the art can be used to determine whether an RNAi agent containing a mismatch to a target sequence is effective in inhibiting the expression of a GSK3α gene. Consideration of the efficacy of RNAi agents with mismatches in inhibiting expression of a GSK3α gene is important, especially if the particular region of complementarity in a GSK3α gene is known to have polymorphic sequence variation within the population.

[0270] The term “sense strand” or “passenger strand” as used herein, refers to the strand of a RNAi agent that includes a region that is substantially complementary to a region of the antisense strand as that term is defined herein.

[0271] As used herein, “substantially all of the nucleotides are modified” are largely but not wholly modified and can include not more than 5, 4, 3, 2, or 1 unmodified nucleotides.

[0272] As used herein, the term “cleavage region” refers to a region that is located immediately adjacent to the cleavage site. The cleavage site is the site on the target at which cleavage occurs. In some embodiments, the cleavage region comprises three bases on either end of, and immediately adjacent to, the cleavage site. In some embodiments, the cleavage region comprises two bases on either end of, and immediately adjacent to, the cleavage site. In some embodiments, the cleavage site specifically occurs at the site bound by nucleotides 10 and 11 of the antisense strand, and the cleavage region comprises nucleotides 11, 12 and 13.

[0273] As used herein, and unless otherwise indicated, the term “complementary,” when used to describe a first nucleotide sequence in relation to a second nucleotide sequence, refers to the ability of an oligonucleotide or polynucleotide comprising the first nucleotide sequence to hybridize and form a duplex structure under certain conditions with an oligonucleotide or polynucleotide comprising the second nucleotide sequence, as will be understood by the skilled person. Such conditions can be, for example, “stringent conditions”, where stringent conditions can include: 400 mM NaCl, 40 mM PIPES pH 6.4, 1 mM EDTA, 50° C. or 70° C. for 12-16 hours followed by washing (see, e.g., “Molecular Cloning: A Laboratory Manual, Sambrook, et al. (1989) Cold Spring Harbor Laboratory Press). Other conditions, such as physiologically relevant conditions as can be encountered inside an organism, can apply. The skilled person will be able to determine the set of conditions most appropriate for a test of complementarity of two sequences in accordance with the ultimate application of the hybridized nucleotides.

[0274] Complementary sequences within a RNAi agent, e.g., within a dsRNA as described herein, include base-pairing of the oligonucleotide or polynucleotide comprising a first nucleotide sequence to an oligonucleotide or polynucleotide comprising a second nucleotide sequence over the entire length of one or both nucleotide sequences. Such sequences can be referred to as “fully complementary” with respect to each other herein. However, where a first sequence is referred to as “substantially complementary” with respect to a second sequence herein, the two sequences can be fully complementary, or they can form one or more, but generally not more than 5, 4, 3, or 2 mismatched base pairs upon hybridization for a duplex up to 30 base pairs, while retaining the ability to hybridize under the conditions most relevant to their ultimate application, e.g., inhibition of gene expression, in vitro or in vivo. However, where two oligonucleotides are designed to form, upon hybridization, one or more single stranded overhangs, such overhangs shall not be regarded as mismatches with regard to the determination of complementarity. For example, a dsRNA comprising one oligonucleotide 21 nucleotides in length and another oligonucleotide 23 nucleotides in length, wherein the longer oligonucleotide comprises a sequence of 21 nucleotides that is fully complementary to the shorter oligonucleotide, can yet be referred to as “fully complementary” for the purposes described herein.

[0275] “Complementary” sequences, as used herein, can also include, or be formed entirely from, non-Watson-Crick base pairs or base pairs formed from non-natural and modified nucleotides, in so far as the above requirements with respect to their ability to hybridize are fulfilled. Such non-Watson-Crick base pairs include, but are not limited to, G:U Wobble or Hoogsteen base pairing.

[0276] The terms “complementary,” “fully complementary” and “substantially complementary” herein can be used with respect to the base matching between the sense strand and the antisense strand of a dsRNA, or between two oligonucleotides or polynucleotides, such as the antisense strand of a RNAi agent and a target sequence, as will be understood from the context of their use.

[0277] As used herein, a polynucleotide that is “substantially complementary to at least part of” a messenger RNA (mRNA) refers to a polynucleotide that is substantially complementary to a contiguous portion of the mRNA of interest (e.g., an mRNA encoding GSK3α). For example, a polynucleotide is complementary to at least a part of a GSK3α mRNA if the sequence is substantially complementary to a non-interrupted portion of an mRNA encoding GSK3α.

[0278] Accordingly, in some embodiments, the antisense strand polynucleotides disclosed herein are fully complementary to the target GSK3α sequence.

[0279] In other embodiments, the antisense strand polynucleotides disclosed herein are substantially complementary to the target GSK3α sequence and comprise a contiguous nucleotide sequence which is at least about 80% complementary over its entire length to the equivalent region of the nucleotide sequence of SEQ ID NOs: 1, 3, 5, or 7 for GSK3α, or a fragment of SEQ ID NOs: 1, 3, 5, or 7, such as about 85%, about 90%, or about 95% complementary.

[0280] In other embodiments, the antisense polynucleotides disclosed herein are substantially complementary to the target GSK3α sequence and comprise a contiguous nucleotide sequence which is at least about 80% complementary over its entire length to any one of the sense strand nucleotide sequences in any one of Tables 2-5 and 8-9, or a fragment of any one of the sense strand nucleotide sequences in any one of Tables 2-5 and 8-9, such as about 85%, about 90%, or about 95% complementary.

[0281] In some embodiments, the antisense polynucleotides disclosed herein are substantially complementary to a fragment of a target GSK3α sequence and comprise a contiguous nucleotide sequence which is at least 80% complementary over its entire length to a fragment of SEQ ID NO: 1 selected from the group of nucleotides 476-518, 588-620, 610-638, 636-664, 676-722, 688-722, 900-928, 955-992, 1007-1035, 1026-1054, 1187-1222, 1187-1252, 1224-1252, 1265-1298, 1342-1370, 1397-1433, 1509-1554, 1509-1537, 1563-1591, 1760-1791, 1983-2017, 1983-2011, 2116-2191, and 2116-2164, of SEQ ID NO: 1, such as about 85%, about 90%, about 91%, about 92%, about 93%, about 94%, about 95%, about 96%, about 97%, about 98%, or about 99% complementary. In some embodiments, the antisense polynucleotides disclosed herein are substantially complementary to a fragment of a target GSK3α sequence and comprise a contiguous nucleotide sequence which is at least 80% complementary over its entire length to a fragment of SEQ ID NO: 1 selected from the group of nucleotides 542-564; 666-688; 1012-1034; 1573-1595; 1845-1867; 2075-2097; 2225-2247; 2227-2249 of SEQ ID NO: 1, such as about 85%, about 90%, about 91%, about 92%, about 93%, about 94%, about 95%, about 96%, about 97%, about 98%, or about 99% complementary.

[0282] In some embodiments, the antisense polynucleotides disclosed herein are substantially complementary to a fragment of a target GSK3α sequence and comprise a contiguous nucleotide sequence which is at least 80% complementary over its entire length to a fragment of SEQ ID NO: 1 selected from the group of nucleotides 1573-1595, 1845-1867, 2075-2097 and 2225-2247 of SEQ ID NO: 1, such as about 85%, about 90%, about 91%, about 92%, about 93%, about 94%, about 95%, about 96%, about 97%, about 98%, or about 99% complementary.

[0283] In certain embodiments, the sense and/or antisense strands are selected from any one of duplexes AD-1190533.1; AD-1190657.1; AD-1190925.1; AD-1191336.1; AD-1191510.1; AD-1191578.1; AD-1191658.1; and AD-1191660.1.

[0284] In certain embodiments, the sense and/or antisense strands are selected from any one of duplexes AD-1191336.1; AD-1191510.1; AD-1191578.1; and AD-1191658.1.

[0285] In certain embodiments, the sense and/or antisense strands are selected from any one of duplexes AD-1531847, AD-1531848, AD-1531849 and AD-1531850.

[0286] In one embodiment, an RNAi agent of the disclosure includes a sense strand that is substantially complementary to an antisense polynucleotide which, in turn, is the same as a target GSK3α sequence, and wherein the sense strand polynucleotide comprises a contiguous nucleotide sequence which is at least about 80% complementary over its entire length to the equivalent region of the nucleotide sequence of SEQ ID NOs: 2, 4, 6, or 8, or a fragment of any one of SEQ ID NOs: 2, 4, 6, or 8, such as about 85%, about 90%, or about 95% complementary.

[0287] In some embodiments, an iRNA of the invention includes a sense strand that is substantially complementary to an antisense polynucleotide which, in turn, is complementary to a target GSK3α sequence, and wherein the sense strand polynucleotide comprises a contiguous nucleotide sequence which is at least about 80% complementary over its entire length to any one of the antisense strand nucleotide sequences in any one of any one of Tables 2-5 and 8-9, or a fragment of any one of the antisense strand nucleotide sequences in any one of Tables 2-5 and 8-9, such as about 85%, about 90%, or about 95% complementary.

[0288] In some embodiments, the double-stranded region of a double-stranded iRNA agent is equal to or at least, 10, 11, 12, 13, 14, 15, 16, 17, 18, 19, 20, 21, 22, 23, 23, 24, 25, 26, 27, 28, 29, 30 or more nucleotide pairs in length.

[0289] In some embodiments, the antisense strand of a double-stranded iRNA agent is equal to or at least 14, 15, 16, 17, 18, 19, 20, 21, 22, 23, 23, 24, 25, 26, 27, 28, 29, or 30 nucleotides in length.

[0290] In some embodiments, the sense strand of a double-stranded iRNA agent is equal to or at least 10, 11, 12, 13, 14, 15, 16, 17, 18, 19, 20, 21, 22, 23, 23, 24, 25, 26, 27, 28, 29, or 30 nucleotides in length.

[0291] In one embodiment, the sense and antisense strands of the double-stranded iRNA agent are each independently 15 to 30 nucleotides in length.

[0292] In one embodiment, the sense and antisense strands of the double-stranded iRNA agent are each independently 19 to 25 or 19 to 30 nucleotides in length.

[0293] In one embodiment, the sense and antisense strands of the double-stranded iRNA agent are each independently 21 to 23 nucleotides in length.

[0294] In one embodiment, the sense strand of the iRNA agent is 21-nucleotides in length, and the antisense strand is 23-nucleotides in length, wherein the strands form a double-stranded region of 21 consecutive base pairs having a 2-nucleotide long single stranded overhangs at the 3-end.

[0295] In one aspect of the invention, an agent for use in the methods and compositions of the invention is a single-stranded antisense nucleic acid molecule that inhibits a target mRNA via an antisense inhibition mechanism. The single-stranded antisense RNA molecule is complementary to a sequence within the target mRNA. The single-stranded antisense oligonucleotides can inhibit translation in a stoichiometric manner by base pairing to the mRNA and physically obstructing the translation machinery, see Dias, N. et al., (2002) Mol Cancer Ther 1:347-355. The single-stranded antisense RNA molecule may be about 15 to about 30 nucleotides in length and have a sequence that is complementary to a target sequence. For example, the single-stranded antisense RNA molecule may comprise a sequence that is at least about 15, 16, 17, 18, 19, 20, or more contiguous nucleotides from any one of the antisense sequences described herein.

[0296] In one embodiment, at least partial suppression of the expression of a GSK3α gene, is assessed by a reduction of the amount of GSK3α mRNA which can be isolated from or detected in a first cell or group of cells in which a GSK3α gene is transcribed and which has or have been treated such that the expression of a GSK3α gene is inhibited, as compared to a second cell or group of cells substantially identical to the first cell or group of cells but which has or have not been so treated (control cells). The degree of inhibition may be expressed in terms of:

$$\frac{( mRNA in control cells ) - ( mRNA in treated cells )}{( mRNA in control cells )} \cdot 100 \%$$

[0297] In one embodiment, inhibition of expression is determined by the dual luciferase method in Example 1 wherein the RNAi agent is present at 10 nM.

[0298] The phrase “contacting a cell with an RNAi agent,” such as a dsRNA, as used herein, includes contacting a cell by any possible means. Contacting a cell with an RNAi agent includes contacting a cell in vitro with the RNAi agent or contacting a cell in vivo with the RNAi agent. The contacting may be done directly or indirectly. Thus, for example, the RNAi agent may be put into physical contact with the cell by the individual performing the method, or alternatively, the RNAi agent may be put into a situation that will permit or cause it to subsequently come into contact with the cell.

[0299] Contacting a cell in vitro may be done, for example, by incubating the cell with the RNAi agent. Contacting a cell in vivo may be done, for example, by injecting the RNAi agent into or near the tissue where the cell is located, or by injecting the RNAi agent into another area, e.g., the central nervous system (CNS), optionally via intrathecal, intracerebroventricular or other injection, or to the bloodstream or the subcutaneous space, such that the agent will subsequently reach the tissue where the cell to be contacted is located. For example, the RNAi agent may contain or be coupled to a ligand, e.g., a lipophilic moiety or moieties as described below and further detailed, e.g., in PCT Publication No. WO 2019/217459, which is incorporated herein by reference, that directs or otherwise stabilizes the RNAi agent at a site of interest, e.g., the CNS. In some embodiments, the RNAi agent may contain or be coupled to a ligand, e.g., one or more GalNAc derivatives as described below, that directs or otherwise stabilizes the RNAi agent at a site of interest, e.g., the liver. In other embodiments, the RNAi agent may contain or be coupled to a lipophilic moiety or moieties and one or more GalNAc derivatives. Combinations of in vitro and in vivo methods of contacting are also possible. For example, a cell may also be contacted in vitro with an RNAi agent and subsequently transplanted into a subject.

[0300] In one embodiment, contacting a cell with an RNAi agent includes “introducing” or “delivering the RNAi agent into the cell” by facilitating or effecting uptake or absorption into the cell. Absorption or uptake of a RNAi agent can occur through unaided diffusive or active cellular processes, or by auxiliary agents or devices. Introducing a RNAi agent into a cell may be in vitro or in vivo. For example, for in vivo introduction, a RNAi agent can be injected into a tissue site or administered systemically. In vitro introduction into a cell includes methods known in the art such as electroporation and lipofection. Further approaches are described herein below or are known in the art.

[0301] The term “lipophile” or “lipophilic moiety” broadly refers to any compound or chemical moiety having an affinity for lipids. One way to characterize the lipophilicity of the lipophilic moiety is by the octanol-water partition coefficient, log K_{ow}, where K_{ow} is the ratio of a chemical's concentration in the octanol-phase to its concentration in the aqueous phase of a two-phase system at equilibrium. The octanol-water partition coefficient is a laboratory-measured property of a substance. However, it may also be predicted by using coefficients attributed to the structural components of a chemical which are calculated using first-principle or empirical methods (see, for example, Tetko et al., J. Chem. Inf. Comput. Sci. 41:1407-21 (2001), which is incorporated herein by reference in its entirety). It provides a thermodynamic measure of the tendency of the substance to prefer a non-aqueous or oily milieu rather than water (i.e. its hydrophilic/lipophilic balance). In principle, a chemical substance is lipophilic in character when its log K_{ow} exceeds 0. Typically, the lipophilic moiety possesses a log K_{ow} exceeding 1, exceeding 1.5, exceeding 2, exceeding 3, exceeding 4, exceeding 5, or exceeding 10. For instance, the log K_{ow} of 6-amino hexanol, for instance, is predicted to be approximately 0.7. Using the same method, the log K_{ow} of cholesteryl N-(hexan−6-ol) carbamate is predicted to be 10.7.

[0302] The lipophilicity of a molecule can change with respect to the functional group it carries. For instance, adding a hydroxyl group or amine group to the end of a lipophilic moiety can increase or decrease the partition coefficient (e.g., log K_{ow}) value of the lipophilic moiety.

[0303] Alternatively, the hydrophobicity of the double-stranded RNAi agent, conjugated to one or more lipophilic moieties, can be measured by its protein binding characteristics. For instance, in certain embodiments, the unbound fraction in the plasma protein binding assay of the double-stranded RNAi agent could be determined to positively correlate to the relative hydrophobicity of the double-stranded RNAi agent, which could then positively correlate to the silencing activity of the double-stranded RNAi agent.

[0304] In one embodiment, the plasma protein binding assay determined is an electrophoretic mobility shift assay (EMSA) using human serum albumin protein. An exemplary protocol of this binding assay is illustrated in detail in, e.g., PCT Publication No. WO 2019/217459. The hydrophobicity of the double-stranded RNAi agent, measured by fraction of unbound siRNA in the binding assay, exceeds 0.15, exceeds 0.2, exceeds 0.25, exceeds 0.3, exceeds 0.35, exceeds 0.4, exceeds 0.45, or exceeds 0.5 for an enhanced in vivo delivery of siRNA.

[0305] Accordingly, conjugating the lipophilic moieties to the internal position(s) of the double-stranded RNAi agent provides optimal hydrophobicity for the enhanced in vivo delivery of siRNA.

[0306] The term “lipid nanoparticle” or “LNP” is a vesicle comprising a lipid layer encapsulating a pharmaceutically active molecule, such as a nucleic acid molecule, e.g., a RNAi agent or a plasmid from which a RNAi agent is transcribed. LNPs are described in, for example, U.S. Pat. Nos. 6,858,225, 6,815,432, 8,158,601, and 8,058,069, the entire contents of which are hereby incorporated herein by reference.

[0307] As used herein, a “subject” is an animal, such as a mammal, including a primate (such as a human, a non-human primate, e.g., a monkey, and a chimpanzee), or a non-primate (such as a a rat, or a mouse). In one embodiment, the subject is a human, such as a human being treated or assessed for a disease, disorder, or condition that would benefit from reduction in GSK3α expression; a human at risk for a disease, disorder, or condition that would benefit from reduction in GSK3α expression; a human having a disease, disorder, or condition that would benefit from reduction in GSK3α expression; or human being treated for a disease, disorder, or condition that would benefit from reduction in GSK3α expression as described herein.

[0308] As used herein, the terms “treating” or “treatment” refer to a beneficial or desired result including, but not limited to, alleviation or amelioration of one or more signs or symptoms associated with GSK3α gene expression or GSK3α protein production, e.g., GSK3α-associated neurodegenerative disease, e.g., fragile X syndrome (FXS), anxiety, hyperactive behavior, seizures, e.g., audiogenic seizures, aggression, impulsivity, nonsense word repetition, repetitive movements, self-harm, persistent repetition of words or actions, flaccid muscles or problems with coordination, exaggerated protein synthesis, cortical hyperexcitability, and inhibitory avoidance learning tasks, in subjects having such neurodegenerative diseases. “Treatment” can also mean prolonging survival as compared to expected survival in the absence of treatment.

[0309] The term “lower” in the context of the level of GSK3α in a subject or a disease marker or symptom refers to a statistically significant decrease in such level. The decrease can be, for example, at least 10%, 15%, 20%, 25%, 30%, %, 40%, 45%, 50%, 55%, 60%, 65%, 70%, 75%, 80%, 85%, 90%, 95%, or more. In certain embodiments, a decrease is at least 20%. In certain embodiments, the decrease is at least 50% in a disease marker, e.g., protein or gene expression level. “Lower” in the context of the level of GSK3α in a subject is a decrease to a level accepted as within the range of normal for an individual without such disorder. In certain embodiments, “lower” is the decrease in the difference between the level of a marker or symptom for a subject suffering from a disease and a level accepted within the range of normal for an individual, e.g., the level of decrease in bodyweight between an obese individual and an individual having a weight accepted within the range of normal.

[0310] As used herein, “prevention” or “preventing,” when used in reference to a disease, disorder, or condition thereof, that would benefit from a reduction in expression of a GSK3α gene or production of a GSK3α protein, refers to a reduction in the likelihood that a subject will develop a symptom associated with such a disease, disorder, or condition, e.g., a symptom of a GSK3α-associated neurodegenerative disease. The failure to develop a disease, disorder, or condition, or the reduction in the development of a symptom associated with such a disease, disorder, or condition, e.g., neuroinflammation (e.g., by at least about 10% on a clinically accepted scale for that disease or disorder), or the exhibition of delayed symptoms delayed (e.g., by days, weeks, months or years) is considered effective prevention.

[0311] As used herein, the term “GSK3α-associated neurodegenerative disease” or “GSK3α-associated neurodegenerative disorder” is understood as any disease or disorder that would benefit from reduction in the expression or activity of GSK3α.

[0312] In one embodiment, a GSK3α-associated neurodegenerative disease is fragile X syndrome (FXS). Fragile X Syndrome (FXS) is an X-linked disorder caused by the loss of fragile X mental retardation protein (FMRP) due to a CGG triplet repeat expansion in the 5′ UTR of the fragile X mental retardation 1 (FMR1) gene (Verkerk A J M H, et al., Cell. 1991; 65(5):905-914). In phenotypically normal individuals this triplet is repeated between 5 and 40 times, while individuals with greater than 200 repeats (known as the full mutation) present with FXS (Willemsen R, et al. Clin Genet. 2011; 80(3):214-225). As the most common known cause of inherited intellectual disability, an estimated 1:4000-7000 males and 1:8,000-11,000 females possess the full FMR1 mutation (Hersh J H, et al. Pediatrics. 2011; 127(5):994-1006; Hunter J, et al. Am J Med Genet Part A. 2014; 164(7):1648-1658). FXS patients present with a variety of symptoms spanning developmental, psychological, and physical characteristics. Some of the most common clinical features of FXS are language deficit, intellectual disability, attention-deficit hyperactivity disorder, and to a lesser extent seizures (Rajaratnam A, et al. F1000 Research. 2017; 6(0):2112).

[0313] “Therapeutically effective amount,” as used herein, is intended to include the amount of an RNAi agent that, when administered to a subject having a GSK3α-associated neurodegenerative disease, is sufficient to effect treatment of the disease (e.g., by diminishing, ameliorating, or maintaining the existing disease or one or more symptoms of disease). The “therapeutically effective amount” may vary depending on the RNAi agent, how the agent is administered, the disease and its severity and the history, age, weight, family history, genetic makeup, the types of preceding or concomitant treatments, if any, and other individual characteristics of the subject to be treated.

[0314] “Prophylactically effective amount,” as used herein, is intended to include the amount of a RNAi agent that, when administered to a subject having a GSK3α-associated neurodegenerative disorder, is sufficient to prevent or ameliorate the disease or one or more symptoms of the disease. Ameliorating the disease includes slowing the course of the disease or reducing the severity of later-developing disease. The “prophylactically effective amount” may vary depending on the RNAi agent, how the agent is administered, the degree of risk of disease, and the history, age, weight, family history, genetic makeup, the types of preceding or concomitant treatments, if any, and other individual characteristics of the patient to be treated.

[0315] A “therapeutically-effective amount” or “prophylacticaly effective amount” also includes an amount of a RNAi agent that produces some desired local or systemic effect at a reasonable benefit/risk ratio applicable to any treatment. A RNAi agent employed in the methods of the present disclosure may be administered in a sufficient amount to produce a reasonable benefit/risk ratio applicable to such treatment.

[0316] The phrase “pharmaceutically acceptable” is employed herein to refer to those compounds (including salts), materials, compositions, or dosage forms which are, within the scope of sound medical judgment, suitable for use in contact with the tissues of human subjects and animal subjects without excessive toxicity, irritation, allergic response, or other problem or complication, commensurate with a reasonable benefit/risk ratio.

[0317] The phrase “pharmaceutically-acceptable carrier” as used herein means a pharmaceutically-acceptable material, composition or vehicle, such as a liquid or solid filler, diluent, excipient, manufacturing aid (e.g., lubricant, talc magnesium, calcium or zinc stearate, or steric acid), or solvent encapsulating material, involved in carrying or transporting the subject compound from one organ, or portion of the body, to another organ, or portion of the body. Each carrier must be “acceptable” in the sense of being compatible with the other ingredients of the formulation and not injurious to the subject being treated. Some examples of materials which can serve as pharmaceutically-acceptable carriers include: (1) sugars, such as lactose, glucose and sucrose; (2) starches, such as corn starch and potato starch; (3) cellulose, and its derivatives, such as sodium carboxymethyl cellulose, ethyl cellulose and cellulose acetate; (4) powdered tragacanth; (5) malt; (6) gelatin; (7) lubricating agents, such as magnesium state, sodium lauryl sulfate and talc; (8) excipients, such as cocoa butter and suppository waxes; (9) oils, such as peanut oil, cottonseed oil, safflower oil, sesame oil, olive oil, corn oil and soybean oil; (10) glycols, such as propylene glycol; (11) polyols, such as glycerin, sorbitol, mannitol and polyethylene glycol; (12) esters, such as ethyl oleate and ethyl laurate; (13) agar; (14) buffering agents, such as magnesium hydroxide and aluminum hydroxide; (15) alginic acid; (16) pyrogen-free water; (17) isotonic saline; (18) Ringer's solution; (19) ethyl alcohol; (20) pH buffered solutions; (21) polyesters, polycarbonates or polyanhydrides; (22) bulking agents, such as polypeptides and amino acids (23) serum component, such as serum albumin, HDL and LDL; and (22) other non-toxic compatible substances employed in pharmaceutical formulations.

[0318] The term “sample,” as used herein, includes a collection of similar fluids, cells, or tissues isolated from a subject, as well as fluids, cells, or tissues present within a subject. Examples of biological fluids include blood, serum and serosal fluids, plasma, cerebrospinal fluid, ocular fluids, lymph, urine, saliva, and the like. Tissue samples may include samples from tissues, organs or localized regions. For example, samples may be derived from particular organs, parts of organs, or fluids or cells within those organs. In certain embodiments, samples may be derived from the brain (e.g., whole brain or certain segments of brain, e.g., striatum, or certain types of cells in the brain, such as, e.g., neurons and glial cells (astrocytes, oligodendrocytes, microglial cells)). In other embodiments, a “sample derived from a subject” refers to liver tissue (or subcomponents thereof) derived from the subject. In some embodiments, a “sample derived from a subject” refers to blood drawn from the subject or plasma or serum derived therefrom. In further embodiments, a “sample derived from a subject” refers to brain tissue (or subcomponents thereof) or retinal tissue (or subcomponents thereof) derived from the subject.

### II. RNAi Agents of the Disclosure

[0319] Described herein are RNAi agents which inhibit the expression of a GSK3α gene. In one embodiment, the RNAi agent includes double stranded ribonucleic acid (dsRNA) molecules for inhibiting the expression of a GSK3α gene in a cell, such as a cell within a subject, e.g., a mammal, such as a human having a GSK3α-associated neurodegenerative disease, e.g., fragile X syndrome (FXS). The dsRNA includes an antisense strand having a region of complementarity which is complementary to at least a part of an mRNA formed in the expression of a GSK3α gene. The region of complementarity is about 15-30 nucleotides or less in length. Upon contact with a cell expressing the GSK3α gene, the RNAi agent inhibits the expression of the GSK3α gene (e.g., a human gene, a primate gene, a non-primate gene) by at least 50% as assayed by, for example, a PCR or branched DNA (bDNA)-based method, or by a protein-based method, such as by immunofluorescence analysis, using, for example, western blotting or flowcytometric techniques. In certain embodiments, inhibition of expression is by at least 50% as assayed by the Dual-Glo lucifierase assay in Example lwhere the siRNA is at a 10 nM concentration.

[0320] A dsRNA includes two RNA strands that are complementary and hybridize to form a duplex structure under conditions in which the dsRNA will be used. One strand of a dsRNA (the antisense strand) includes a region of complementarity that is substantially complementary, and generally fully complementary, to a target sequence. The target sequence can be derived from the sequence of an mRNA formed during the expression of a GSK3α gene. The other strand (the sense strand) includes a region that is complementary to the antisense strand, such that the two strands hybridize and form a duplex structure when combined under suitable conditions. As described elsewhere herein and as known in the art, the complementary sequences of a dsRNA can also be contained as self-complementary regions of a single nucleic acid molecule, as opposed to being on separate oligonucleotides.

[0321] Generally, the duplex structure is 15 to 30 base pairs in length, e.g., 15-29, 15-28, 15-27, 15-26, 15-25, 15-24, 15-23, 15-22, 15-21, 15-20, 15-19, 15-18, 15-17, 18-30, 18-29, 18-28, 18-27, 18-26, 18-25, 18-24, 18-23, 18-22, 18-21, 18-20, 19-30, 19-29, 19-28, 19-27, 19-26, 19-25, 19-24, 19-23, 19-22, 19-21, 19-20, 20-30, 20-29, 20-28, 20-27, 20-26, 20-25, 20-24,20-23, 20-22, 20-21, 21-30, 21-29, 21-28, 21-27, 21-26, 21-25, 21-24, 21-23, or 21-22 base pairs in length. In certain embodiments, the duplex structure is 18 to 25 base pairs in length, e.g., 18-25, 18-24, 18-23, 18-22, 18-21, 18-20, 19-25, 19-24, 19-23, 19-22, 19-21, 19-20, 20-25, 20-24,20-23, 20-22, 20-21, 21-25, 21-24, 21-23, 21-22, 22-25, 22-24, 22-23, 23-25, 23-24 or 24-25 base pairs in length, for example, 19-21 basepairs in length. Ranges and lengths intermediate to the above recited ranges and lengths are also contemplated to be part of the disclosure.

[0322] Similarly, the region of complementarity to the target sequence is 15 to 30 nucleotides in length, e.g., 15-29, 15-28, 15-27, 15-26, 15-25, 15-24, 15-23, 15-22, 15-21, 15-20, 15-19, 15-18, 15-17, 18-30, 18-29, 18-28, 18-27, 18-26, 18-25, 18-24, 18-23, 18-22, 18-21, 18-20, 19-30, 19-29, 19-28, 19-27, 19-26, 19-25, 19-24, 19-23, 19-22, 19-21, 19-20, 20-30, 20-29, 20-28, 20-27, 20-26, 20-25, 20-24,20-23, 20-22, 20-21, 21-30, 21-29, 21-28, 21-27, 21-26, 21-25, 21-24, 21-23, or 21-22 nucleotides in length, for example 19-23 nucleotides in length or 21-23 nucleotides in length. Ranges and lengths intermediate to the above recited ranges and lengths are also contemplated to be part of the disclosure.

[0323] In some embodiments, the dsRNA is 15 to 23 nucleotides in length, 25 to 30 nucleotides in length, 20 to 30 nucleotides in length or 19 to 30 nucleotides in length. In general, the dsRNA is long enough to serve as a substrate for the Dicer enzyme. For example, it is well known in the art that dsRNAs longer than about 21-23 nucleotides can serve as substrates for Dicer. As the ordinarily skilled person will also recognize, the region of an RNA targeted for cleavage will most often be part of a larger RNA molecule, often an mRNA molecule. Where relevant, a “part” of an mRNA target is a contiguous sequence of an mRNA target of sufficient length to allow it to be a substrate for RNAi-directed cleavage (i.e., cleavage through a RISC pathway).

[0324] One of skill in the art will also recognize that the duplex region is a primary functional portion of a dsRNA, e.g., a duplex region of about 15 to 36 base pairs, e.g., 15-36, 15-35, 15-34, 15-33, 15-32, 15-31, 15-30, 15-29, 15-28, 15-27, 15-26, 15-25, 15-24, 15-23, 15-22, 15-21, 15-20, 15-19, 15-18, 15-17, 18-30, 18-29, 18-28, 18-27, 18-26, 18-25, 18-24, 18-23, 18-22, 18-21, 18-20, 19-30, 19-29, 19-28, 19-27, 19-26, 19-25, 19-24, 19-23, 19-22, 19-21, 19-20, 20-30, 20-29, 20-28, 20-27, 20-26, 20-25, 20-24,20-23, 20-22, 20-21, 21-30, 21-29, 21-28, 21-27, 21-26, 21-25, 21-24, 21-23, or 21-22 base pairs, for example, 19-21 base pairs. Thus, in one embodiment, to the extent that it becomes processed to a functional duplex, of e.g., 15-30 base pairs, that targets a desired RNA for cleavage, an RNA molecule or complex of RNA molecules having a duplex region greater than 30 base pairs is a dsRNA. Thus, an ordinarily skilled artisan will recognize that in one embodiment, a miRNA is a dsRNA. In another embodiment, a dsRNA is not a naturally occurring miRNA. In another embodiment, a RNAi agent useful to target GSK3α expression is not generated in the target cell by cleavage of a larger dsRNA.

[0325] A dsRNA as described herein can further include one or more single-stranded nucleotide overhangs e.g., 1, 2, 3, or 4 nucleotides. A nucleotide overhang can comprise or consist of a nucleotide/nucleoside analog, including a deoxynucleotide/nucleoside. The overhang(s) can be on the sense strand, the antisense strand or any combination thereof. Furthermore, the nucleotide(s) of an overhang can be present on the 5′-end, 3′-end or both ends of either an antisense or sense strand of a dsRNA. In certain embodiments, longer, extended overhangs are possible.

[0326] A dsRNA can be synthesized by standard methods known in the art as further discussed below, e.g., by use of an automated DNA synthesizer, such as are commercially available from, for example, Biosearch, Applied Biosystems, Inc.

[0327] iRNA compounds of the invention may be prepared using a two-step procedure. First, the individual strands of the double stranded RNA molecule are prepared separately. Then, the component strands are annealed. The individual strands of the siRNA compound can be prepared using solution-phase or solid-phase organic synthesis or both. Organic synthesis offers the advantage that the oligonucleotide strands comprising unnatural or modified nucleotides can be easily prepared. Single-stranded oligonucleotides of the invention can be prepared using solution-phase or solid-phase organic synthesis or both.

[0328] An siRNA can be produced, e.g., in bulk, by a variety of methods. Exemplary methods include: organic synthesis and RNA cleavage, e.g., in vitro cleavage.

[0329] An siRNA can be made by separately synthesizing a single stranded RNA molecule, or each respective strand of a double-stranded RNA molecule, after which the component strands can then be annealed.

[0330] A large bioreactor, e.g., the OligoPilot II from Pharmacia Biotec AB (Uppsala Sweden), can be used to produce a large amount of a particular RNA strand for a given siRNA. The OligoPilotII reactor can efficiently couple a nucleotide using only a 1.5 molar excess of a phosphoramidite nucleotide. To make an RNA strand, ribonucleotides amidites are used. Standard cycles of monomer addition can be used to synthesize the 21 to 23 nucleotide strand for the siRNA. Typically, the two complementary strands are produced separately and then annealed, e.g., after release from the solid support and deprotection.

[0331] Organic synthesis can be used to produce a discrete siRNA species. The complementary of the species to a GSK3α gene can be precisely specified. For example, the species may be complementary to a region that includes a polymorphism, e.g., a single nucleotide polymorphism. Further the location of the polymorphism can be precisely defined. In some embodiments, the polymorphism is located in an internal region, e.g., at least 4, 5, 7, or 9 nucleotides from one or both of the termini.

[0332] In one embodiment, RNA generated is carefully purified to remove endsiRNA is cleaved in vitro into siRNAs, for example, using a Dicer or comparable RNAse III-based activity. For example, the dsiRNA can be incubated in an in vitro extract from Drosophila or using purified components, e.g., a purified RNAse or RISC complex (RNA-induced silencing complex). See, e.g., Ketting et al. Genes Dev 2001 Oct. 15; 15(20):2654-9 and Hammond Science 2001 Aug. 10; 293(5532):1146-50.

[0333] dsiRNA cleavage generally produces a plurality of siRNA species, each being a particular 21 to 23 nt fragment of a source dsiRNA molecule. For example, siRNAs that include sequences complementary to overlapping regions and adjacent regions of a source dsiRNA molecule may be present.

[0334] Regardless of the method of synthesis, the siRNA preparation can be prepared in a solution (e.g., an aqueous or organic solution) that is appropriate for formulation. For example, the siRNA preparation can be precipitated and redissolved in pure double-distilled water, and lyophilized. The dried siRNA can then be resuspended in a solution appropriate for the intended formulation process.

[0335] In one aspect, a dsRNA of the disclosure includes at least two nucleotide sequences, a sense sequence and an antisense sequence. The sense strand sequence for GSK3α may be selected from the group of sequences provided in any one of Tables 2-5 and 8-9, and the corresponding nucleotide sequence of the antisense strand of the sense strand may be selected from the group of sequences of any one of Tables 2-5 and 8-9. In this aspect, one of the two sequences is complementary to the other of the two sequences, with one of the sequences being substantially complementary to a sequence of an mRNA generated in the expression of a GSK3α gene. As such, in this aspect, a dsRNA will include two oligonucleotides, where one oligonucleotide is described as the sense strand (passenger strand) in any one of Tables 2-5 and 8-9, and the second oligonucleotide is described as the corresponding antisense strand (guide strand) of the sense strand in any one of Tables 2-5 and 8-9 for GSK3α.

[0336] In one embodiment, the substantially complementary sequences of the dsRNA are contained on separate oligonucleotides. In another embodiment, the substantially complementary sequences of the dsRNA are contained on a single oligonucleotide.

[0337] It will be understood that, although the sequences provided herein are described as modified or conjugated sequences, the RNA of the RNAi agent of the disclosure e.g., a dsRNA of the disclosure, may comprise any one of the sequences set forth in any one of Tables 2-5 and 8-9 that is un-modified, un-conjugated, or modified or conjugated differently than described therein. One or more lipophilic ligands or one or more GalNAc ligands can be included in any of the positions of the RNAi agents provided in the instant application.

[0338] The skilled person is well aware that dsRNAs having a duplex structure of about 20 to 23 base pairs, e.g., 21, base pairs have been hailed as particularly effective in inducing RNA interference (Elbashir et al., (2001) EMBO J., 20:6877-6888). However, others have found that shorter or longer RNA duplex structures can also be effective (Chu and Rana (2007) RNA 14:1714-1719; Kim et al. (2005) Nat Biotech 23:222-226). In the embodiments described above, by virtue of the nature of the oligonucleotide sequences provided herein, dsRNAs described herein can include at least one strand of a length of minimally 21 nucleotides. It can be reasonably expected that shorter duplexes minus only a few nucleotides on one or both ends can be similarly effective as compared to the dsRNAs described above. Hence, dsRNAs having a sequence of at least 15, 16, 17, 18, 19, 20, or more contiguous nucleotides derived from one of the sequences provided herein, and differing in their ability to inhibit the expression of a GSK3α gene by not more than 10, 15, 20, 25, or 30% inhibition from a dsRNA comprising the full sequence using the in vitro assay with Cos7 and a 10 nM concentration of the RNA agent and the PCR assay as provided in the examples herein, are contemplated to be within the scope of the present disclosure.

[0339] In addition, the RNAs described herein identify a site(s) in a GSK3α transcript that is susceptible to RISC-mediated cleavage. As such, the present disclosure further features RNAi agents that target within this site(s). As used herein, a RNAi agent is said to target within a particular site of an RNA transcript if the RNAi agent promotes cleavage of the transcript anywhere within that particular site. Such a RNAi agent will generally include at least about 15 contiguous nucleotides, such as at least 19 nucleotides, from one of the sequences provided herein coupled to additional nucleotide sequences taken from the region contiguous to the selected sequence in a GSK3α gene.

[0340] An RNAi agent as described herein can contain one or more mismatches to the target sequence. In one embodiment, an RNAi agent as described herein contains no more than 3 mismatches (i.e., 3, 2, 1, or 0 mismatches). In one embodiment, an RNAi agent as described herein contains no more than 2 mismatches. In one embodiment, an RNAi agent as described herein contains no more than 1 mismatch. In one embodiment, an RNAi agent as described herein contains 0 mismatches. In certain embodiments, if the antisense strand of the RNAi agent contains mismatches to the target sequence, the mismatch can optionally be restricted to be within the last 5 nucleotides from either the 5′- or 3′-end of the region of complementarity. For example, in such embodiments, for a 23 nucleotide RNAi agent, the strand which is complementary to a region of a GSK3α gene generally does not contain any mismatch within the central 13 nucleotides. The methods described herein or methods known in the art can be used to determine whether an RNAi agent containing a mismatch to a target sequence is effective in inhibiting the expression of a GSK3α gene. Consideration of the efficacy of RNAi agents with mismatches in inhibiting expression of a GSK3α gene is important, especially if the particular region of complementarity in a GSK3α gene is known to have polymorphic sequence variation within the population.

### III. Modified RNAi Agents of the Disclosure

[0341] In one embodiment, the RNA of the RNAi agent of the disclosure e.g., a dsRNA, is un-modified, and does not comprise, e.g., chemical modifications or conjugations known in the art and described herein. In certain embodiments, the RNA of an RNAi agent of the disclosure, e.g., a dsRNA, is chemically modified to enhance stability or other beneficial characteristics. In certain embodiments of the disclosure, substantially all of the nucleotides of an RNAi agent of the disclosure are modified. In other embodiments of the disclosure, all of the nucleotides of an RNAi agent of the disclosure are modified. RNAi agents of the disclosure in which “substantially all of the nucleotides are modified” are largely but not wholly modified and can include not more than 5, 4, 3, 2, or 1 unmodified nucleotides. In still other embodiments of the disclosure, RNAi agents of the disclosure can include not more than 5, 4, 3, 2 or 1 modified nucleotides.

[0342] The nucleic acids featured in the disclosure can be synthesized or modified by methods well established in the art, such as those described in “Current protocols in nucleic acid chemistry,” Beaucage, S. L. et al. (Edrs.), John Wiley & Sons, Inc., New York, NY, USA, which is hereby incorporated herein by reference. Modifications include, for example, end modifications, e.g., 5′-end modifications (phosphorylation, conjugation, inverted linkages) or 3′-end modifications (conjugation, DNA nucleotides, inverted linkages, etc.); base modifications, e.g., replacement with stabilizing bases, destabilizing bases, or bases that base pair with an expanded repertoire of partners, removal of bases (abasic nucleotides), or conjugated bases; sugar modifications (e.g., at the 2′-position or 4′-position) or replacement of the sugar; or backbone modifications, including modification or replacement of the phosphodiester linkages. Specific examples of RNAi agents useful in the embodiments described herein include, but are not limited to, RNAs containing modified backbones or no natural internucleoside linkages. RNAs having modified backbones include, among others, those that do not have a phosphorus atom in the backbone. For the purposes of this specification, and as sometimes referenced in the art, modified RNAs that do not have a phosphorus atom in their internucleoside backbone can also be considered to be oligonucleosides. In some embodiments, a modified RNAi agent will have a phosphorus atom in its internucleoside backbone.

[0343] Modified RNA backbones include, for example, phosphorothioates, chiral phosphorothioates, phosphorodithioates, phosphotriesters, aminoalkylphosphotriesters, methyl and other alkyl phosphonates including 3′-alkylene phosphonates and chiral phosphonates, phosphinates, phosphoramidates including 3′-amino phosphoramidate and aminoalkylphosphoramidates, thionophosphoramidates, thionoalkylphosphonates, thionoalkylphosphotriesters, and boranophosphates having normal 3′-5′ linkages, 2′-5′-linked analogs of these, and those having inverted polarity wherein the adjacent pairs of nucleoside units are linked 3′-5′ to 5′-3′ or 2′-5′ to 5′-2′. Various salts, e.g., sodium salts, mixed salts and free acid forms are also included.

[0344] Representative U.S. patents that teach the preparation of the above phosphorus-containing linkages include, but are not limited to, U.S. Pat. Nos. 3,687,808; 4,469,863; 4,476,301; 5,023,243; 5,177,195; 5,188,897; 5,264,423; 5,276,019; 5,278,302; 5,286,717; 5,321,131; 5,399,676; 5,405,939; 5,453,496; 5,455,233; 5,466,677; 5,476,925; 5,519,126; 5,536,821; 5,541,316; 5,550,111; 5,563,253; 5,571,799; 5,587,361; 5,625,050; 6,028,188; 6,124,445; 6,160,109; 6,169,170; 6,172,209; 6,239,265; 6,277,603; 6,326,199; 6,346,614; 6,444,423; 6,531,590; 6,534,639; 6,608,035; 6,683,167; 6,858,715; 6,867,294; 6,878,805; 7,015,315; 7,041,816; 7,273,933; 7,321,029; and U.S. Pat. RE39464, the entire contents of each of which are hereby incorporated herein by reference.

[0345] Modified RNA backbones that do not include a phosphorus atom therein have backbones that are formed by short chain alkyl or cycloalkyl internucleoside linkages, mixed heteroatoms and alkyl or cycloalkyl internucleoside linkages, or one or more short chain heteroatomic or heterocyclic internucleoside linkages. These include those having morpholino linkages (formed in part from the sugar portion of a nucleoside); siloxane backbones; sulfide, sulfoxide and sulfone backbones; formacetyl and thioformacetyl backbones; methylene formacetyl and thioformacetyl backbones; alkene containing backbones; sulfamate backbones; methyleneimino and methylenehydrazino backbones; sulfonate and sulfonamide backbones; amide backbones; and others having mixed N, O, S and CH₂ component parts.

[0346] Representative U.S. patents that teach the preparation of the above oligonucleosides include, but are not limited to, U.S. Pat. Nos. 5,034,506; 5,166,315; 5,185,444; 5,214,134; 5,216,141; 5,235,033; 5,64,562; 5,264,564; 5,405,938; 5,434,257; 5,466,677; 5,470,967; 5,489,677; 5,541,307; 5,561,225; 5,596,086; 5,602,240; 5,608,046; 5,610,289; 5,618,704; 5,623,070; 5,663,312; 5,633,360; 5,677,437; and, 5,677,439, the entire contents of each of which are hereby incorporated herein by reference.

[0347] In other embodiments, suitable RNA mimetics are contemplated for use in RNAi agents, in which both the sugar and the internucleoside linkage, i.e., the backbone, of the nucleotide units are replaced with novel groups. The base units are maintained for hybridization with an appropriate nucleic acid target compound. One such oligomeric compound, an RNA mimetic that has been shown to have excellent hybridization properties, is referred to as a peptide nucleic acid (PNA). In PNA compounds, the sugar backbone of an RNA is replaced with an amide containing backbone, in particular an aminoethylglycine backbone. The nucleobases are retained and are bound directly or indirectly to aza nitrogen atoms of the amide portion of the backbone. Representative U.S. patents that teach the preparation of PNA compounds include, but are not limited to, U.S. Pat. Nos. 5,539,082; 5,714,331; and 5,719,262, the entire contents of each of which are hereby incorporated herein by reference. Additional PNA compounds suitable for use in the RNAi agents of the disclosure are described in, for example, in Nielsen et al., Science, 1991, 254, 1497-1500.

[0348] Some embodiments featured in the disclosure include RNAs with phosphorothioate backbones and oligonucleosides with heteroatom backbones, and in particular —CH₂—NH—CH₂—, —CH₂—N(CH₃)—O—CH₂—[known as a methylene (methylimino) or MMI backbone], —CH₂—O—N(CH₃)—CH₂—, —CH₂—N(CH₃)—N(CH₃)—CH₂— and —N(CH₃)—CH₂—CH₂— of the above-referenced U.S. Pat. No. 5,489,677, and the amide backbones of the above-referenced U.S. Pat. No. 5,602,240. In some embodiments, the RNAs featured herein have morpholino backbone structures of the above-referenced U.S. Pat. No. 5,034,506. The native phosphodiester backbone can be represented as O—P(O)(OH)—OCH2-.

[0349] Modified RNAs can also contain one or more substituted sugar moieties. The RNAi agents, e.g., dsRNAs, featured herein can include one of the following at the 2′-position: OH; F; O-, S-, or N-alkyl; O-, S-, or N-alkenyl; O-, S- or N-alkynyl; or O-alkyl-O-alkyl, wherein the alkyl, alkenyl and alkynyl can be substituted or unsubstituted C₁ to C₁₀ alkyl or C₂ to C₁₀ alkenyl and alkynyl. Exemplary suitable modifications include O[(CH₂)ₙO]ₘCH₃, O(CH₂)₋ₙOCH₃, O(CH₂)ₙNH₂, O(CH₂)ₙCH₃, O(CH₂)ₙONH₂, and O(CH₂)ₙON[(CH₂)ₙCH₃)]₂, where n and m are from 1 to about 10. In other embodiments, dsRNAs include one of the following at the 2′ position: C₁ to C₁₀ lower alkyl, substituted lower alkyl, alkaryl, aralkyl, O-alkaryl or O-aralkyl, SH, SCH₃, OCN, Cl, Br, CN, CF₃, OCF₃, SOCH₃, SO₂CH₃, ONO₂, NO₂, N₃, NH₂, heterocycloalkyl, heterocycloalkaryl, aminoalkylamino, polyalkylamino, substituted silyl, an RNA cleaving group, a reporter group, an intercalator, a group for improving the pharmacokinetic properties of a RNAi agent, or a group for improving the pharmacodynamic properties of a RNAi agent, and other substituents having similar properties. In some embodiments, the modification includes a 2′-methoxyethoxy (2′-O—CH₂CH₂OCH₃, also known as 2′-O-(2-methoxyethyl) or 2′-MOE) (Martin et al., Helv. Chim. Acta, 1995, 78:486-504) i.e., an alkoxy-alkoxy group. Another exemplary modification is 2′-dimethylaminooxyethoxy, i.e., a O(CH₂)₂ON(CH₃)₂ group, also known as 2′-DMAOE, as described in examples herein below, and 2′-dimethylaminoethoxyethoxy (also known in the art as 2′-O-dimethylaminoethoxyethyl or 2′-DMAEOE), i.e., 2′-O—CH₂—O—CH₂—N(CH₃)₂. Further exemplary modifications include: 5′-Me-2′-F nucleotides, 5′-Me-2′-OMe nucleotides, 5′-Me-2′-deoxynucleotides, (both R and S isomers in these three families); 2′-alkoxyalkyl; and 2′-NMA (N-methylacetamide).

[0350] Other modifications include 2′-methoxy (2′-OCH₃), 2′-aminopropoxy (2′-OCH₂CH₂CH₂NH₂), 2′-O-hexadecyl, and 2′-fluoro (2′-F). Similar modifications can also be made at other positions on the RNA of a RNAi agent, particularly the 3′ position of the sugar on the 3′ terminal nucleotide or in 2′-5′ linked dsRNAs and the 5′ position of 5′ terminal nucleotide. RNAi agents can also have sugar mimetics such as cyclobutyl moieties in place of the pentofuranosyl sugar. Representative U.S. patents that teach the preparation of such modified sugar structures include, but are not limited to, U.S. Pat. Nos. 4,981,957; 5,118,800; 5,319,080; 5,359,044; 5,393,878; 5,446,137; 5,466,786; 5,514,785; 5,519,134; 5,567,811; 5,576,427; 5,591,722; 5,597,909; 5,610,300; 5,627,053; 5,639,873; 5,646,265; 5,658,873; 5,670,633; and 5,700,920, certain of which are commonly owned with the instant application. The entire contents of each of the foregoing are hereby incorporated herein by reference.

[0351] An RNAi agent of the disclosure can also include nucleobase (often referred to in the art simply as “base”) modifications or substitutions. As used herein, “unmodified” or “natural” nucleobases include the purine bases adenine (A) and guanine (G), and the pyrimidine bases thymine (T), cytosine (C) and uracil (U). Modified nucleobases include other synthetic and natural nucleobases such as 5-methylcytosine (5-me-C), 5-hydroxymethyl cytosine, xanthine, hypoxanthine, 2-aminoadenine, 6-methyl and other alkyl derivatives of adenine and guanine, 2-propyl and other alkyl derivatives of adenine and guanine, 2-thiouracil, 2-thiothymine and 2-thiocytosine, 5-halouracil and cytosine, 5-propynyl uracil and cytosine, 6-azo uracil, cytosine and thymine, 5-uracil (pseudouracil), 4-thiouracil, 8-halo, 8-amino, 8-thiol, 8-thioalkyl, 8-hydroxyl anal other 8-substituted adenines and guanines, 5-halo, particularly 5-bromo, 5-trifluoromethyl and other 5-substituted uracils and cytosines, 7-methylguanine and 7-methyladenine, 8-azaguanine and 8-azaadenine, 7-deazaguanine and 7-daazaadenine and 3-deazaguanine and 3-deazaadenine. Further nucleobases include those disclosed in U.S. Pat. No. 3,687,808, those disclosed in Modified Nucleosides in Biochemistry, Biotechnology and Medicine, Herdewijn, P. ed. Wiley-VCH, 2008; those disclosed in The Concise Encyclopedia Of Polymer Science And Engineering, pages 858-859, Kroschwitz, J. L, ed. John Wiley & Sons, 1990, these disclosed by Englisch et al., (1991) Angewandte Chemie, International Edition, 30:613, and those disclosed by Sanghvi, Y S., Chapter 15, dsRNA Research and Applications, pages 289-302, Crooke, S. T. and Lebleu, B., Ed., CRC Press, 1993. Certain of these nucleobases are particularly useful for increasing the binding affinity of the oligomeric compounds featured in the disclosure. These include 5-substituted pyrimidines, 6-azapyrimidines and N-2, N-6 and 0-6 substituted purines, including 2-aminopropyladenine, 5-propynyluracil and 5-propynylcytosine. 5-methylcytosine substitutions have been shown to increase nucleic acid duplex stability by 0.6-1.2° C. (Sanghvi, Y. S., Crooke, S. T. and Lebleu, B., Eds., dsRNA Research and Applications, CRC Press, Boca Raton, 1993, pp. 276-278) and are exemplary base substitutions, even more particularly when combined with 2′-O-methoxyethyl sugar modifications.

[0352] Representative U.S. patents that teach the preparation of certain of the above noted modified nucleobases as well as other modified nucleobases include, but are not limited to, the above noted U.S. Pat. Nos. 3,687,808, 4,845,205; 5,130,30; 5,134,066; 5,175,273; 5,367,066; 5,432,272; 5,457,187; 5,459,255; 5,484,908; 5,502,177; 5,525,711; 5,552,540; 5,587,469; 5,594,121, 5,596,091; 5,614,617; 5,681,941; 5,750,692; 6,015,886; 6,147,200; 6,166,197; 6,222,025; 6,235,887; 6,380,368; 6,528,640; 6,639,062; 6,617,438; 7,045,610; 7,427,672; and 7,495,088, the entire contents of each of which are hereby incorporated herein by reference.

[0353] An RNAi agent of the disclosure can also be modified to include one or more bicyclic sugar moities. A “bicyclic sugar” is a furanosyl ring modified by a ring formed by the bridging of two carbons, whether adjacent or non-adjacent. A “bicyclic nucleoside” (“BNA”) is a nucleoside having a sugar moiety comprising a ring formed by bridging two carbons, whether adjacent or non-adjacent, of the sugar ring, thereby forming a bicyclic ring system. In certain embodiments, the bridge connects the 4′-carbon and the 2′-carbon of the sugar ring, optionally, via the 2′-acyclic oxygen atom. Thus, in some embodiments an agent of the disclosure may include one or more locked nucleic acids (LNA). A locked nucleic acid is a nucleotide having a modified ribose moiety in which the ribose moiety comprises an extra bridge connecting the 2′ and 4′ carbons. In other words, an LNA is a nucleotide comprising a bicyclic sugar moiety comprising a 4′-CH2-O-2′ bridge. This structure effectively “locks” the ribose in the 3′-endo structural conformation. The addition of locked nucleic acids to siRNAs has been shown to increase siRNA stability in serum, and to reduce off-target effects (Elmen, J. et al., (2005) Nucleic Acids Research 33(1):439-447; Mook, O R. et al., (2007) Mol Canc Ther 6(3):833-843; Grunweller, A. et al., (2003) Nucleic Acids Research 31(12):3185-3193). Examples of bicyclic nucleosides for use in the polynucleotides of the disclosure include without limitation nucleosides comprising a bridge between the 4′ and the 2′ ribosyl ring atoms. In certain embodiments, the antisense polynucleotide agents of the disclosure include one or more bicyclic nucleosides comprising a 4′ to 2′ bridge.

[0354] A locked nucleoside can be represented by the structure (omitting stereochemistry),

[chemical structure]

[0355] wherein B is a nucleobase or modified nucleobase and L is the linking group that joins the 2′-carbon to the 4′-carbon of the ribose ring. Examples of such 4′ to 2′ bridged bicyclic nucleosides, include but are not limited to 4′-(CH₂)—O-2′ (LNA); 4′-(CH₂)—S-2′; 4′-(CH₂)₂—O-2′ (ENA); 4′-CH(CH₃)—O-2′ (also referred to as “constrained ethyl” or “cEt”) and 4′-CH(CH₂OCH₃)—O-2′ (and analogs thereof; see, e.g., U.S. Pat. No. 7,399,845); 4′-C(CH₃)(CH₃)—O-2′ (and analogs thereof; see e.g., U.S. Pat. No. 8,278,283); 4′-CH₂—N(OCH₃)-2′ (and analogs thereof; see e.g., U.S. Pat. No. 8,278,425); 4′-CH₂—O—N(CH₃)-2′ (see, e.g., U.S. Patent Publication No. 2004/0171570); 4′-CH2-N(R)—O-2′, wherein R is H, C1-C12 alkyl, or a nitrogen protecting group (see, e.g., U.S. Pat. No. 7,427,672; Greene's Protective Groups in Organic Synthesis, Fourth Edition, 2006, eds. John Wiley & Sons, Inc.); 4′-CH₂—C(H)(CH₃)-2′ (see, e.g., Chattopadhyaya et al., J. Org. Chem., 2009, 74, 118-134); and 4′-CH₂—C(═CH₂)-2′ (and analogs thereof; see, e.g., U.S. Pat. No. 8,278,426). The entire contents of each of the foregoing are hereby incorporated herein by reference.

[0356] Additional representative US patents and US patenttent Publications that teach the preparation of locked nucleic acid nucleotides include, but are not limited to, the following: U.S. Pat. Nos. 6,268,490; 6,525,191; 6,670,461; 6,770,748; 6,794,499; 6,998,484; 7,053,207; 7,034,133; 7,084,125; 7,399,845; 7,427,672; 7,569,686; 7,741,457; 8,022,193; 8,030,467; 8,278,425; 8,278,426; 8,278,283; US 2008/0039618; and US 2009/0012281, the entire contents of each of which are hereby incorporated herein by reference.

[0357] Any of the foregoing bicyclic nucleosides can be prepared having one or more stereochemical sugar configurations including for example α-L-ribofuranose and β-D-ribofuranose (see WO 99/14226).

[0358] An RNAi agent of the disclosure can also be modified to include one or more constrained ethyl nucleotides. As used herein, a “constrained ethyl nucleotide” or “cEt” is a locked nucleic acid comprising a bicyclic sugar moiety comprising a 4′-CH(CH₃)—O-2′ bridge (i.e., L in the preceding structure). In one embodiment, a constrained ethyl nucleotide is in the S conformation referred to herein as “S-cEt.”

[0359] An RNAi agent of the disclosure may also include one or more “conformationally restricted nucleotides” (“CRN”). CRN are nucleotide analogs with a linker connecting the C2′ and C4′ carbons of ribose or the C3 and -C5′ carbons of ribose. CRN lock the ribose ring into a stable conformation and increase the hybridization affinity to mRNA. The linker is of sufficient length to place the oxygen in an optimal position for stability and affinity resulting in less ribose ring puckering.

[0360] Representative publications that teach the preparation of certain of the above noted CRN include, but are not limited to, US 2013/0190383; and WO 2013/036868, the entire contents of each of which are hereby incorporated herein by reference.

[0361] In some embodiments, a RNAi agent of the disclosure comprises one or more monomers that are UNA (unlocked nucleic acid) nucleotides. UNA is unlocked acyclic nucleic acid, wherein any of the bonds of the sugar has been removed, forming an unlocked “sugar” residue. In one example, UNA also encompasses monomer with bonds between C1′-C4′ have been removed (i.e. the covalent carbon-oxygen-carbon bond between the C1′ and C4′ carbons). In another example, the C2′-C3′ bond (i.e. the covalent carbon-carbon bond between the C2′ and C3′ carbons) of the sugar has been removed (see Nuc. Acids Symp. Series, 52, 133-134 (2008) and Fluiter et al., Mol. Biosyst., 2009, 10, 1039 hereby incorporated by reference).

[0362] Representative U.S. publications that teach the preparation of UNA include, but are not limited to, U.S. Pat. No. 8,314,227; and US Patent Publication Nos. 2013/0096289; 2013/0011922; and 2011/0313020, the entire contents of each of which are hereby incorporated herein by reference.

[0363] Potentially stabilizing modifications to the ends of RNA molecules can include N-(acetylaminocaproyl)-4-hydroxyprolinol (Hyp-C6-NHAc), N-(caproyl-4-hydroxyprolinol (Hyp-C6), N-(acetyl-4-hydroxyprolinol (Hyp-NHAc), thymidine-2′-O-deoxythymidine (ether), N-(aminocaproyl)-4-hydroxyprolinol (Hyp-C6-amino), 2-docosanoyl-uridine-3′-phosphate, inverted 2′-deoxy-modified ribonucleotide, such as inverted dT(idT), inverted dA (idA), and inverted abasic 2′-deoxyribonucleotide (iAb) and others. Disclosure of this modification can be found in WO 2011/005861.

[0364] In one example, the 3′ or 5′ terminal end of a oligonucleotide is linked to an inverted 2′-deoxy-modified ribonucleotide, such as inverted dT(idT), inverted dA (idA), or a inverted abasic 2′-deoxyribonucleotide (iAb). In one particular example, the inverted 2′-deoxy-modified ribonucleotide is linked to the 3′end of an oligonucleotide, such as the 3′-end of a sense strand described herein, where the linking is via a 3′-3′ phosphodiester linkage or a 3′-3′-phosphorothioate linkage.

[0365] In another example, the 3′-end of a sense strand is linked via a 3′-3′-phosphorothioate linkage to an inverted abasic ribonucleotide (iAb). In another example, the 3′-end of a sense strand is linked via a 3′-3′-phosphorothioate linkage to an inverted dA (idA).

[0366] In one particular example, the inverted 2′-deoxy-modified ribonucleotide is linked to the 3′end of an oligonucleotide, such as the 3′-end of a sense strand described herein, where the linking is via a 3′-3′ phosphodiester linkage or a 3′-3′-phosphorothioate linkage.

[0367] In another example, the 3′-terminal nucleotides of a sense strand is an inverted dA (idA) and is linked to the preceding nucleotide via a 3′-3′-linkage (e.g., 3′-3′-phosphorothioate linkage).

[0368] Other modifications of a RNAi agent of the disclosure include a 5′ phosphate or 5′ phosphate mimic, e.g., a 5′-terminal phosphate or phosphate mimic on the antisense strand of a RNAi agent. Suitable phosphate mimics are disclosed in, for example US 2012/0157511, the entire contents of which are incorporated herein by reference.

A. Modified RNAi agents Comprising Motifs of the Disclosure

[0369] In certain aspects of the disclosure, the double-stranded RNAi agents of the disclosure include agents with chemical modifications as disclosed, for example, in WO 2013/075035, the entire contents of which are incorporated herein by reference. As shown herein and in WO 2013/075035, one or more motifs of three identical modifications on three consecutive nucleotides may be introduced into a sense strand or antisense strand of an RNAi agent, particularly at or near the cleavage site. In some embodiments, the sense strand and antisense strand of the RNAi agent may otherwise be completely modified. The introduction of these motifs interrupts the modification pattern, if present, of the sense or antisense strand. The RNAi agent may be optionally conjugated with a lipophilic ligand, e.g., a C16 ligand, for instance on the sense strand. The RNAi agent may be optionally modified with a (S)-glycol nucleic acid (GNA) modification, for instance on one or more residues of the antisense strand.

[0370] Accordingly, the disclosure provides double stranded RNAi agents capable of inhibiting the expression of a target gene (i.e., a GSK3α gene) in vivo. The RNAi agent comprises a sense strand and an antisense strand. Each strand of the RNAi agent may be 15-30 nucleotides in length. For example, each strand may be 16-30 nucleotides in length, 17-30 nucleotides in length, 25-30 nucleotides in length, 27-30 nucleotides in length, 17-23 nucleotides in length, 17-21 nucleotides in length, 17-19 nucleotides in length, 19-25 nucleotides in length, 19-23 nucleotides in length, 19-21 nucleotides in length, 21-25 nucleotides in length, or 21-23 nucleotides in length. In certain embodiments, each strand is 19-23 nucleotides in length.

[0371] The sense strand and antisense strand typically form a duplex double stranded RNA (“dsRNA”), also referred to herein as an “RNAi agent.” The duplex region of an RNAi agent may be 15-30 nucleotide pairs in length. For example, the duplex region can be 16-30 nucleotide pairs in length, 17-30 nucleotide pairs in length, 27-30 nucleotide pairs in length, 17-23 nucleotide pairs in length, 17-21 nucleotide pairs in length, 17-19 nucleotide pairs in length, 19-25 nucleotide pairs in length, 19-23 nucleotide pairs in length, 19-21 nucleotide pairs in length, 21-25 nucleotide pairs in length, or 21-23 nucleotide pairs in length. In another example, the duplex region is selected from 15, 16, 17, 18, 19, 20, 21, 22, 23, 24, 25, 26, and 27 nucleotides in length. In certain embodiments, the duplex region is 19-21 nucleotide pairs in length.

[0372] In one embodiment, the RNAi agent may contain one or more overhang regions or capping groups at the 3′-end, 5′-end, or both ends of one or both strands. The overhang can be 1-6 nucleotides in length, for instance 2-6 nucleotides in length, 1-5 nucleotides in length, 2-5 nucleotides in length, 1-4 nucleotides in length, 2-4 nucleotides in length, 1-3 nucleotides in length, 2-3 nucleotides in length, or 1-2 nucleotides in length. In certain embodiments, the nucleotide overhang region is 2 nucleotides in length. The overhangs can be the result of one strand being longer than the other, or the result of two strands of the same length being staggered. The overhang can form a mismatch with the target mRNA or it can be complementary to the gene sequences being targeted or can be another sequence. The first and second strands can also be joined, e.g., by additional bases to form a hairpin, or by other non-base linkers.

[0373] In one embodiment, the nucleotides in the overhang region of the RNAi agent can each independently be a modified or unmodified nucleotide including, but no limited to 2′-sugar modified, such as, 2-F, 2′-O-methyl, thymidine (T), and any combinations thereof.

[0374] For example, TT can be an overhang sequence for either end on either strand. The overhang can form a mismatch with the target mRNA or it can be complementary to the gene sequences being targeted or can be another sequence.

[0375] The 5′- or 3′-overhangs at the sense strand, antisense strand or both strands of the RNAi agent may be phosphorylated. In some embodiments, the overhang region(s) contains two nucleotides having a phosphorothioate between the two nucleotides, where the two nucleotides can be the same or different. In one embodiment, the overhang is present at the 3′-end of the sense strand, antisense strand, or both strands. In one embodiment, this 3′-overhang is present in the antisense strand. In one embodiment, this 3′-overhang is present in the sense strand.

[0376] The RNAi agent may contain only a single overhang, which can strengthen the interference activity of the RNAi, without affecting its overall stability. For example, the single-stranded overhang may be located at the 3-terminal end of the sense strand or, alternatively, at the 3-terminal end of the antisense strand. The RNAi may also have a blunt end, located at the 5′-end of the antisense strand (or the 3′-end of the sense strand) or vice versa. Generally, the antisense strand of the RNAi has a nucleotide overhang at the 3′-end, and the 5′-end is blunt. While not wishing to be bound by theory, the asymmetric blunt end at the 5′-end of the antisense strand and 3′-end overhang of the antisense strand favor the guide strand loading into RISC process.

[0377] In one embodiment, the RNAi agent is a double blunt-ended of 19 nucleotides in length, wherein the sense strand contains at least one motif of three 2′-F modifications on three consecutive nucleotides at positions 7, 8, and 9 from the 5′end. The antisense strand contains at least one motif of three 2′-O-methyl modifications on three consecutive nucleotides at positions 11, 12, and 13 from the 5′end.

[0378] In another embodiment, the RNAi agent is a double blunt-ended of 20 nucleotides in length, wherein the sense strand contains at least one motif of three 2′-F modifications on three consecutive nucleotides at positions 8, 9, and 10 from the 5′end. The antisense strand contains at least one motif of three 2′-O-methyl modifications on three consecutive nucleotides at positions 11, 12, and 13 from the 5′end.

[0379] In yet another embodiment, the RNAi agent is a double blunt-ended of 21 nucleotides in length, wherein the sense strand contains at least one motif of three 2′-F modifications on three consecutive nucleotides at positions 9, 10, and 11 from the 5′end. The antisense strand contains at least one motif of three 2′-O-methyl modifications on three consecutive nucleotides at positions 11, 12, and 13 from the 5′end.

[0380] In one embodiment, the RNAi agent comprises a 21 nucleotide sense strand and a 23 nucleotide antisense strand, wherein the sense strand contains at least one motif of three 2′-F modifications on three consecutive nucleotides at positions 9, 10, and 11 from the 5′end; the antisense strand contains at least one motif of three 2′-O-methyl modifications on three consecutive nucleotides at positions 11, 12, and 13 from the 5′end, wherein one end of the RNAi agent is blunt, while the other end comprises a 2 nucleotide overhang. In one example, the two nucleotide overhang is at the 3′-end of the antisense strand. When the 2 nucleotide overhang is at the 3′-end of the antisense strand, there may be two phosphorothioate internucleotide linkages between the terminal three nucleotides, wherein two of the three nucleotides are the overhang nucleotides, and the third nucleotide is a paired nucleotide next to the overhang nucleotide. In one embodiment, the RNAi agent additionally has two phosphorothioate internucleotide linkages between the terminal three nucleotides at both the 5′-end of the sense strand and at the 5′-end of the antisense strand. In one embodiment, every nucleotide in the sense strand and the antisense strand of the RNAi agent, including the nucleotides that are part of the motifs are modified nucleotides. In one embodiment each residue is independently modified with a 2′-O-methyl or 2′-fluoro, e.g., in an alternating motif. Optionally, the RNAi agent further comprises a ligand (e.g., a lipophilic ligand, optionally a C16 ligand).

[0381] In one embodiment, the RNAi agent comprises a sense and an antisense strand, wherein the sense strand is 25-30 nucleotide residues in length, wherein starting from the 5′ terminal nucleotide (position 1) positions 1 to 23 of the first strand comprise at least 8 ribonucleotides; the antisense strand is 36-66 nucleotide residues in length and, starting from the 3′ terminal nucleotide, comprises at least 8 ribonucleotides in the positions paired with positions 1-23 of sense strand to form a duplex; wherein at least the 3′terminal nucleotide of antisense strand is unpaired with sense strand, and up to 6 consecutive 3′ terminal nucleotides are unpaired with sense strand, thereby forming a 3′ single stranded overhang of 1-6 nucleotides; wherein the 5′ terminus of antisense strand comprises from 10-30 consecutive nucleotides which are unpaired with sense strand, thereby forming a 10-30 nucleotide single stranded 5′ overhang; wherein at least the sense strand 5′ terminal and 3′ terminal nucleotides are base paired with nucleotides of antisense strand when sense and antisense strands are aligned for maximum complementarity, thereby forming a substantially duplexed region between sense and antisense strands; and antisense strand is sufficiently complementary to a target RNA along at least 19 ribonucleotides of antisense strand length to reduce target gene expression when the double stranded nucleic acid is introduced into a mammalian cell; and wherein the sense strand contains at least one motif of three 2′-F modifications on three consecutive nucleotides, where at least one of the motifs occurs at or near the cleavage site. The antisense strand contains at least one motif of three 2′-O-methyl modifications on three consecutive nucleotides at or near the cleavage site.

[0382] In one embodiment, the RNAi agent comprises sense and antisense strands, wherein the RNAi agent comprises a first strand having a length which is at least 25 and at most 29 nucleotides and a second strand having a length which is at most 30 nucleotides with at least one motif of three 2′-O-methyl modifications on three consecutive nucleotides at position 11, 12, and 13 from the 5′ end; wherein the 3′ end of the first strand and the 5′ end of the second strand form a blunt end and the second strand is 1-4 nucleotides longer at its 3′ end than the first strand, wherein the duplex region region which is at least 25 nucleotides in length, and the second strand is sufficiently complemenatary to a target mRNA along at least 19 nucleotide of the second strand length to reduce target gene expression when the RNAi agent is introduced into a mammalian cell, and wherein dicer cleavage of the RNAi agent preferentially results in an siRNA comprising the 3′ end of the second strand, thereby reducing expression of the target gene in the mammal. Optionally, the RNAi agent further comprises a ligand.

[0383] In one embodiment, the sense strand of the RNAi agent contains at least one motif of three identical modifications on three consecutive nucleotides, where one of the motifs occurs at the cleavage site in the sense strand.

[0384] In one embodiment, the antisense strand of the RNAi agent can also contain at least one motif of three identical modifications on three consecutive nucleotides, where one of the motifs occurs at or near the cleavage site in the antisense strand.

[0385] For an RNAi agent having a duplex region of 17-23 nucleotide in length, the cleavage site of the antisense strand is typically around the 10, 11 and 12 positions from the 5′-end. Thus the motifs of three identical modifications may occur at the 9, 10, and 11 positions; 10, 11, and 12 positions; 11, 12, and 13 positions; 12, 13, and 14 positions; or 13, 14, and 15 positions of the antisense strand, the count starting from the 1^{st} nucleotide from the 5′-end of the antisense strand, or, the count starting from the first paired nucleotide within the duplex region from the 5′-end of the antisense strand. The cleavage site in the antisense strand may also change according to the length of the duplex region of the RNAi from the 5′-end.

[0386] The sense strand of the RNAi agent may contain at least one motif of three identical modifications on three consecutive nucleotides at the cleavage site of the strand; and the antisense strand may have at least one motif of three identical modifications on three consecutive nucleotides at or near the cleavage site of the strand. When the sense strand and the antisense strand form a dsRNA duplex, the sense strand and the antisense strand can be so aligned that one motif of the three nucleotides on the sense strand and one motif of the three nucleotides on the antisense strand have at least one nucleotide overlap, i.e., at least one of the three nucleotides of the motif in the sense strand forms a base pair with at least one of the three nucleotides of the motif in the antisense strand. Alternatively, at least two nucleotides may overlap, or all three nucleotides may overlap.

[0387] In one embodiment, the sense strand of the RNAi agent may contain more than one motif of three identical modifications on three consecutive nucleotides. The first motif may occur at or near the cleavage site of the strand and the other motifs may be a wing modification. The term “wing modification” herein refers to a motif occurring at another portion of the strand that is separated from the motif at or near the cleavage site of the same strand. The wing modification is either adjacent to the first motif or is separated by at least one or more nucleotides. When the motifs are immediately adjacent to each other then the chemistry of the motifs are distinct from each other and when the motifs are separated by one or more nucleotide than the chemistries can be the same or different. Two or more wing modifications may be present. For instance, when two wing modifications are present, each wing modification may occur at one end relative to the first motif which is at or near cleavage site or on either side of the lead motif.

[0388] Like the sense strand, the antisense strand of the RNAi agent may contain more than one motif of three identical modifications on three consecutive nucleotides, with at least one of the motifs occurring at or near the cleavage site of the strand. This antisense strand may also contain one or more wing modifications in an alignment similar to the wing modifications that may be present on the sense strand.

[0389] In one embodiment, the wing modification on the sense strand or antisense strand of the RNAi agent typically does not include the first one or two terminal nucleotides at the 3′-end, 5′-end or both ends of the strand.

[0390] In another embodiment, the wing modification on the sense strand or antisense strand of the RNAi agent typically does not include the first one or two paired nucleotides within the duplex region at the 3′-end, 5′-end or both ends of the strand.

[0391] When the sense strand and the antisense strand of the RNAi agent each contain at least one wing modification, the wing modifications may fall on the same end of the duplex region, and have an overlap of one, two or three nucleotides.

[0392] When the sense strand and the antisense strand of the RNAi agent each contain at least two wing modifications, the sense strand and the antisense strand can be so aligned that two modifications each from one strand fall on one end of the duplex region, having an overlap of one, two or three nucleotides; two modifications each from one strand fall on the other end of the duplex region, having an overlap of one, two or three nucleotides; two modifications one strand fall on each side of the lead motif, having an overlap of one, two, or three nucleotides in the duplex region.

[0393] In one embodiment, the RNAi agent comprises mismatch(es) with the target, within the duplex, or combinations thereof. The mistmatch may occur in the overhang region or the duplex region. The base pair may be ranked on the basis of their propensity to promote dissociation or melting (e.g., on the free energy of association or dissociation of a particular pairing, the simplest approach is to examine the pairs on an individual pair basis, though next neighbor or similar analysis can also be used). In terms of promoting dissociation: A:U is preferred over G:C; G:U is preferred over G:C; and J:C is preferred over G:C (I=inosine). Mismatches, e.g., non-canonical or other than canonical pairings (as described elsewhere herein) are preferred over canonical (A:T, A:U, G:C) pairings; and pairings which include a universal base are preferred over canonical pairings.

[0394] In one embodiment, the RNAi agent comprises at least one of the first 1, 2, 3, 4, or 5 base pairs within the duplex regions from the 5′-end of the antisense strand independently selected from the group of: A:U, G:U, J:C, and mismatched pairs, e.g., non-canonical or other than canonical pairings or pairings which include a universal base, to promote the dissociation of the antisense strand at the 5′-end of the duplex.

[0395] In one embodiment, the nucleotide at the 1 position within the duplex region from the 5′-end in the antisense strand is selected from the group consisting of A, dA, dU, U, and dT. Alternatively, at least one of the first 1, 2 or 3 base pair within the duplex region from the 5′-end of the antisense strand is an AU base pair. For example, the first base pair within the duplex region from the 5′-end of the antisense strand is an AU base pair.

[0396] In another embodiment, the nucleotide at the 3′-end of the sense strand is deoxythimidine (dT). In another embodiment, the nucleotide at the 3′-end of the antisense strand is deoxythimidine (dT). In one embodiment, there is a short sequence of deoxythimidine nucleotides, for example, two dT nucleotides on the 3′-end of the sense or antisense strand.

[0397] In one embodiment, the sense strand sequence may be represented by formula (I):

5′nₚ-Nₐ—(XXX)ᵢ—N_{b}—YYY—N_{b}—(ZZZ)ⱼ—Nₐ-n_{q}3′ (I)
[0398] wherein:
[0399] i and j are each independently 0 or 1;
[0400] p and q are each independently 0-6;
[0401] each Nₐ independently represents an oligonucleotide sequence comprising 0-25 modified nucleotides, each sequence comprising at least two differently modified nucleotides;
[0402] each N_{b} independently represents an oligonucleotide sequence comprising 0-10 modified nucleotides;
[0403] each nₚ and n_{q} independently represent an overhang nucleotide;
[0404] wherein Nb and Y do not have the same modification; and
[0405] XXX, YYY and ZZZ each independently represent one motif of three identical modifications on three consecutive nucleotides. In one embodiment, YYY is all 2′-F modified nucleotides.

[0406] In one embodiment, the Nₐ or N_{b} comprise modifications of alternating pattern.

[0407] In one embodiment, the YYY motif occurs at or near the cleavage site of the sense strand. For example, when the RNAi agent has a duplex region of 17-23 nucleotides in length, the YYY motif can occur at or the vicinity of the cleavage site (e.g.: can occur at positions 6, 7, 8, 7, 8, 9, 8, 9, 10, 9, 10, 11, 10, 11, 12 or 11, 12, 13) of—the sense strand, the count starting from the 1^{St} nucleotide, from the 5′-end; or optionally, the count starting at the 1′ paired nucleotide within the duplex region, from the 5′-end.

[0408] In one embodiment, i is 1 and j is 0, or i is 0 and j is 1, or both i and j are 1. The sense strand can therefore be represented by the following formulas:

5′nₚ-Nₐ—YYY—N_{b}—ZZZ—Nₐ-n_{q}3′ (Ib);

5′nₚ-Nₐ—XXX—N_{b}—YYY—Nₐ-n_{q}3′ (Ic); or

5′nₚ-Nₐ—XXX—N_{b}—YYY—N_{b}—ZZZ—Nₐ-n_{q}3′ (Id).

[0409] When the sense strand is represented by formula (Ib), N_{b} represents an oligonucleotide sequence comprising 0-10, 0-7, 0-5, 0-4, 0-2 or 0 modified nucleotides.

[0410] Each Nₐ independently can represent an oligonucleotide sequence comprising 2-20, 2-15, or 2-10 modified nucleotides.

[0411] When the sense strand is represented as formula (Ic), N_{b} represents an oligonucleotide sequence comprising 0-10, 0-7, 0-10, 0-7, 0-5, 0-4, 0-2 or 0 modified nucleotides. Each Nₐ can independently represent an oligonucleotide sequence comprising 2-20, 2-15, or 2-10 modified nucleotides.

[0412] When the sense strand is represented as formula (Id), each N_{b} independently represents an oligonucleotide sequence comprising 0-10, 0-7, 0-5, 0-4, 0-2 or 0 modified nucleotides. In one embodiment, N_{b} is 0, 1, 2, 3, 4, 5 or 6. Each Nₐ can independently represent an oligonucleotide sequence comprising 2-20, 2-15, or 2-10 modified nucleotides.

[0413] Each of X, Y and Z may be the same or different from each other.

[0414] In other embodiments, i is 0 and j is 0, and the sense strand may be represented by the formula:

5′nₚ-Nₐ—YYY—Nₐ-n_{q}3′ (Ia).

[0415] When the sense strand is represented by formula (Ia), each Nₐ independently can represent an oligonucleotide sequence comprising 2-20, 2-15, or 2-10 modified nucleotides.

[0416] In one embodiment, the antisense strand sequence of the RNAi may be represented by formula (II):

5′n_{q}′—Nₐ′—(Z′Z′Z′)ₖ—N_{b}′—Y′Y′Y′—N_{b}′—(X′X′X′)ₗ—N′ₐ-nₚ′3′ (II)
[0417] wherein:
[0418] k and l are each independently 0 or 1;
[0419] p‘ and q’ are each independently 0-6;
   each Nₐ′ independently represents an oligonucleotide sequence comprising 0-25 modified nucleotides, each sequence comprising at least two differently modified nucleotides;
   each N_{b}′ independently represents an oligonucleotide sequence comprising 0-10 modified nucleotides;
   each nₚ′ and n_{q}′ independently represent an overhang nucleotide;
   wherein N_{b}′ and Y′ do not have the same modification; and
   X′X′X′, Y′Y′Y′ and Z′Z′Z′ each independently represent one motif of three identical modifications on three consecutive nucleotides.

[0420] In one embodiment, the Nₐ′ or N_{b}′ comprise modifications of alternating pattern.

[0421] The Y′Y′Y′ motif occurs at or near the cleavage site of the antisense strand. For example, when the RNAi agent has a duplex region of 17-23 nucleotide in length, the Y′Y′Y′ motif can occur at positions 9, 10, 11; 10, 11, 12; 11, 12, 13; 12, 13, 14; or 13, 14, 15 of the antisense strand, with the count starting from the 1^{St} nucleotide, from the 5′-end; or optionally, the count starting at the 1′ paired nucleotide within the duplex region, from the 5′-end. In one embodiment, the Y′Y′Y′ motif occurs at positions 11, 12, 13.

[0422] In one embodiment, Y′Y′Y′ motif is all 2′-OMe modified nucleotides.

[0423] In one embodiment, k is 1 and 1 is 0, or k is 0 and 1 is 1, or both k and l are 1.

[0424] The antisense strand can therefore be represented by the following formulas:

5′n_{q}′—Nₐ′—Z′Z′Z′—N_{b}′—Y′Y′Y′—Nₐ′-nₚ,3′ (IIb);

5′n_{q}′—Nₐ′—Y′Y′Y′—N_{b}′—X′X′X′-nₚ,3′ (IIc); or

5′n_{q}′—Nₐ′—Z′Z′Z′—N_{b}′—Y′Y′Y′—N_{b}′—X′X′X′—Nₐ′-nₚ,3′ (IId).

[0425] When the antisense strand is represented by formula (IIb), N_{b}′ represents an oligonucleotide sequence comprising 0-10, 0-7, 0-10, 0-7, 0-5, 0-4, 0-2 or 0 modified nucleotides. Each Nₐ′ independently represents an oligonucleotide sequence comprising 2-20, 2-15, or 2-10 modified nucleotides.

[0426] When the antisense strand is represented as formula (IIc), N_{b}′ represents an oligonucleotide sequence comprising 0-10, 0-7, 0-10, 0-7, 0-5, 0-4, 0-2 or 0 modified nucleotides. Each Nₐ′ independently represents an oligonucleotide sequence comprising 2-20, 2-15, or 2-10 modified nucleotides.

[0427] When the antisense strand is represented as formula (IId), each N_{b}′ independently represents an oligonucleotide sequence comprising 0-10, 0-7, 0-10, 0-7, 0-5, 0-4, 0-2 or 0 modified nucleotides. Each Nₐ′ independently represents an oligonucleotide sequence comprising 2-20, 2-15, or 2-10 modified nucleotides. In one embodiment, N_{b} is 0, 1, 2, 3, 4, 5 or 6.

[0428] In other embodiments, k is 0 and 1 is 0 and the antisense strand may be represented by the formula:

5′n_{p′}-Nₐ′—Y′Y′Y′—Nₐ-n_{q},3′ (Ia).

[0429] When the antisense strand is represented as formula (IIa), each Nₐ′ independently represents an oligonucleotide sequence comprising 2-20, 2-15, or 2-10 modified nucleotides.

[0430] Each of X′, Y′ and Z′ may be the same or different from each other.

[0431] Each nucleotide of the sense strand and antisense strand may be independently modified with LNA, HNA, CeNA, 2′-methoxyethyl, 2′-O-methyl, 2′-O-allyl, 2′-C-allyl, 2′-hydroxyl, or 2′-fluoro. For example, each nucleotide of the sense strand and antisense strand is independently modified with 2′-O-methyl or 2′-fluoro. Each X, Y, Z, X′, Y′ and Z′, in particular, may represent a 2′-O-methyl modification or a 2′-fluoro modification.

[0432] In one embodiment, the sense strand of the RNAi agent may contain YYY motif occurring at 9, 10 and 11 positions of the strand when the duplex region is 21 nt, the count starting from the 1^{st} nucleotide from the 5′-end, or optionally, the count starting at the 1′ paired nucleotide within the duplex region, from the 5′-end; and Y represents 2′-F modification. The sense strand may additionally contain XXX motif or ZZZ motifs as wing modifications at the opposite end of the duplex region; and XXX and ZZZ each independently represents a 2′-OMe modification or 2′-F modification.

[0433] In one embodiment the antisense strand may contain Y′Y′Y′ motif occurring at positions 11, 12, 13 of the strand, the count starting from the 1′ nucleotide from the 5′-end, or optionally, the count starting at the 1′ paired nucleotide within the duplex region, from the 5′-end; and Y′ represents 2′-O-methyl modification. The antisense strand may additionally contain X′X′X′ motif or Z′Z′Z′ motifs as wing modifications at the opposite end of the duplex region; and X′X′X′ and Z′Z′Z′ each independently represents a 2′-OMe modification or 2′-F modification.

[0434] The sense strand represented by any one of the above formulas (Ia), (Ib), (Ic), and (Id) forms a duplex with a antisense strand being represented by any one of formulas (IIa), (JIb), (IIc), and (IId), respectively.

[0435] Accordingly, the RNAi agents for use in the methods of the disclosure may comprise a sense strand and an antisense strand, each strand having 14 to 30 nucleotides, the RNAi duplex represented by formula (III):

sense: 5′n-Nₐ—(XXX)ᵢ—N_{b}—YYY—N_{b}—(ZZZ)ⱼ—Nₐ-n_{q}3′

antisense:3′nₚ′—Nₐ′—(X′X′X′)ₖ—N_{b}′—Y′Y′Y′—N_{b}′—(Z′Z′Z′)ₗ-Nₐ′-n_{q}′5′ (III)
[0436] wherein:
[0437] i, j, k, and l are each independently 0 or 1;
[0438] p, p′, q, and q′ are each independently 0-6;
[0439] each Nₐ and Nₐ′ independently represents an oligonucleotide sequence comprising 0-25 modified nucleotides, each sequence comprising at least two differently modified nucleotides;
[0440] each N_{b} and N_{b}′ independently represents an oligonucleotide sequence comprising 0-10 modified nucleotides;
[0441] wherein
[0442] each nₚ′, nₚ, n_{q}′, and n_{q}, each of which may or may not be present, independently represents an overhang nucleotide; and
[0443] XXX, YYY, ZZZ, X′X′X′, Y′Y′Y′, and Z′Z′Z′ each independently represent one motif of three identical modifications on three consecutive nucleotides.

[0444] In one embodiment, i is 0 and j is 0; or i is 1 and j is 0; or i is 0 and j is 1; or both i and j are 0; or both i and j are 1. In another embodiment, k is 0 and 1 is 0; or k is 1 and 1 is 0; k is 0 and 1 is 1; or both k and 1 are 0; or both k and l are 1.

[0445] Exemplary combinations of the sense strand and antisense strand forming a RNAi duplex include the formulas below:

5′nₚ-Nₐ—YYY—Nₐ-n_{q}3′

3′nₚ′—Nₐ′—Y′Y′Y′—Nₐ′-n_{q}′5′ (IIIa)

5′nₚ-Nₐ—YYY—N_{b}—ZZZ—Nₐ-n_{q}3′

3′nₚ′—Nₐ′—Y′Y′Y′—N_{b}′—Z′Z′Z′—Nₐ′-n_{q}′5′ (IIb)

5′nₚ-Nₐ—XXX—N_{b}—YYY—Nₐ-n_{q}3′

3′nₚ′—Nₐ′—X′X′X′—N_{b}′—Y′Y′Y′—Nₐ′-n_{q}′5′ (IIIc)

5′nₚ-Nₐ—XXX—N_{b}—YYY—N_{b}—ZZZ—Nₐ-n_{q}3′

3′nₚ′—Nₐ′—X′X′X′—N_{b}′—Y′Y′Y′—N_{b}′—Z′Z′Z′—Nₐ-n_{q}′5′ (IIId)

[0446] When the RNAi agent is represented by formula (IIIa), each Nₐ independently represents an oligonucleotide sequence comprising 2-20, 2-15, or 2-10 modified nucleotides.

[0447] When the RNAi agent is represented by formula (IIIb), each N_{b} independently represents an oligonucleotide sequence comprising 1-10, 1-7, 1-5 or 1-4 modified nucleotides. Each Nₐ independently represents an oligonucleotide sequence comprising 2-20, 2-15, or 2-10 modified nucleotides.

[0448] When the RNAi agent is represented as formula (IIIc), each N_{b}, N_{b}′ independently represents an oligonucleotide sequence comprising 0-10, 0-7, 0-10, 0-7, 0-5, 0-4, 0-2 or 0 modified nucleotides. Each Nₐ independently represents an oligonucleotide sequence comprising 2-20, 2-15, or 2-10 modified nucleotides.

[0449] When the RNAi agent is represented as formula (IIId), each N_{b}, N_{b}′ independently represents an oligonucleotide sequence comprising 0-10, 0-7, 0-10, 0-7, 0-5, 0-4, 0-2 or 0 modified nucleotides. Each Nₐ, Nₐ′ independently represents an oligonucleotide sequence comprising 2-20, 2-15, or 2-10 modified nucleotides. Each of Nₐ, Nₐ′, N_{b} and N_{b}′ independently comprises modifications of alternating pattern.

[0450] In one embodiment, when the RNAi agent is represented by formula (IIId), the Nₐ modifications are 2′-O-methyl or 2′-fluoro modifications. In another embodiment, when the RNAi agent is represented by formula (IIId), the Nₐ modifications are 2′-O-methyl or 2′-fluoro modifications and nₚ′>0 and at least one nₚ′ is linked to a neighboring nucleotide a via phosphorothioate linkage. In yet another embodiment, when the RNAi agent is represented by formula (IIId), the Nₐ modifications are 2′-O-methyl or 2′-fluoro modifications, nₚ′>0 and at least one nₚ′ is linked to a neighboring nucleotide via phosphorothioate linkage, and the sense strand is conjugated to one or more C16 (or related) moieties attached through a bivalent or trivalent branched linker (described below). In another embodiment, when the RNAi agent is represented by formula (IIId), the Nₐ modifications are 2′-O-methyl or 2′-fluoro modifications, nₚ′>0 and at least one nₚ′ is linked to a neighboring nucleotide via phosphorothioate linkage, the sense strand comprises at least one phosphorothioate linkage, and the sense strand is conjugated to one or more lipophilic, e.g., C16 (or related) moieties, optionally attached through a bivalent or trivalent branched linker.

[0451] In one embodiment, when the RNAi agent is represented by formula (IIIa), the Nₐ modifications are 2′-O-methyl or 2′-fluoro modifications, nₚ′>0 and at least one nₚ′ is linked to a neighboring nucleotide via phosphorothioate linkage, the sense strand comprises at least one phosphorothioate linkage, and the sense strand is conjugated to one or more lipophilic, e.g., C16 (or related) moieties attached through a bivalent or trivalent branched linker.

[0452] In one embodiment, the RNAi agent is a multimer containing at least two duplexes represented by formula (III), (IIIa), (IIb), (IIc), and (IIId), wherein the duplexes are connected by a linker. The linker can be cleavable or non-cleavable. Optionally, the multimer further comprises a ligand. Each of the duplexes can target the same gene or two different genes; or each of the duplexes can target same gene at two different target sites.

[0453] In one embodiment, the RNAi agent is a multimer containing three, four, five, six or more duplexes represented by formula (III), (IIIa), (IIb), (IIc), and (IIId), wherein the duplexes are connected by a linker. The linker can be cleavable or non-cleavable. Optionally, the multimer further comprises a ligand. Each of the duplexes can target the same gene or two different genes; or each of the duplexes can target same gene at two different target sites.

[0454] In one embodiment, two RNAi agents represented by formula (III), (IIIa), (IIb), (IIc), and (IIId) are linked to each other at the 5′ end, and one or both of the 3′ ends and are optionally conjugated to to a ligand. Each of the agents can target the same gene or two different genes; or each of the agents can target same gene at two different target sites.

[0455] Various publications describe multimeric RNAi agents that can be used in the methods of the disclosure. Such publications include WO2007/091269, WO2010/141511, WO2007/117686, WO2009/014887, and WO2011/031520; and U.S. Pat. No. 7,858,769, the entire contents of each of which are hereby incorporated herein by reference.

[0456] In certain embodiments, the compositions and methods of the disclosure include a vinyl phosphonate (VP) modification of an RNAi agent as described herein. In exemplary embodiments, a 5′-vinyl phosphonate modified nucleotide of the disclosure has the structure:

[chemical structure]

[0457] wherein X is O or S;
[0458] R is hydrogen, hydroxy, fluoro, or C₁₋₂₀alkoxy (e.g., methoxy or n-hexadecyloxy);
[0459] R^{5′} is ═C(H)—P(O)(OH)₂ and the double bond between the C5′ carbon and R5′ is in the E or Z orientation (e.g., E orientation); and B is a nucleobase or a modified nucleobase, optionally where B is adenine, guanine, cytosine, thymine, or uracil.

[0460] In one embodiment, R^{5′} is ═C(H)—P(O)(OH)₂ and the double bond between the C5′ carbon and R5′ is in the E orientation. In another embodiment, R is methoxy and R^{5′} is ═C(H)—P(O)(OH)₂ and the double bond between the C5′ carbon and R5′ is in the E orientation. In another embodiment, X is S, R is methoxy, and R^{5′} is ═C(H)—P(O)(OH)₂ and the double bond between the C5′ carbon and R5′ is in the E orientation.

[0461] A vinyl phosphonate of the instant disclosure may be attached to either the antisense or the sense strand of a dsRNA of the disclosure. In certain embodiments, a vinyl phosphonate of the instant disclosure is attached to the antisense strand of a dsRNA, optionally at the 5′ end of the antisense strand of the dsRNA.

[0462] Vinyl phosphate modifications are also contemplated for the compositions and methods of the instant disclosure. An exemplary vinyl phosphate structure includes the preceding structure, where R^{5′} is ═C(H)—OP(O)(OH)₂ and the double bond between the C5′ carbon and R5′ is in the E or Z orientation (e.g., E orientation).

[0463] E. Thermally Destabilizing Modifications

[0464] In certain embodiments, a dsRNA molecule can be optimized for RNA interference by incorporating thermally destabilizing modifications in the seed region of the antisense strand. As used herein “seed region” means at positions 2-5 and 8-9 of the 5′-end of the referenced strand, OR at positions 2-8 of the 5′-end of the referenced strand. For example, thermally destabilizing modifications can be incorporated in the seed region of the antisense strand to reduce or inhibit off-target gene silencing.

[0465] The term “thermally destabilizing modification(s)” includes modification(s) that would result with a dsRNA with a lower overall melting temperature (Tm) than the Tm of the dsRNA without having such modification(s). For example, the thermally destabilizing modification(s) can decrease the Tm of the dsRNA by 1-4° C., such as one, two, three or four degrees Celcius. And, the term “thermally destabilizing nucleotide” refers to a nucleotide containing one or more thermally destabilizing modifications.

[0466] It has been discovered that dsRNAs with an antisense strand comprising at least one thermally destabilizing modification of the duplex within the first 9 nucleotide positions, counting from the 5′ end, of the antisense strand have reduced off-target gene silencing activity. Accordingly, in some embodiments, the antisense strand comprises at least one (e.g., one, two, three, four, five or more) thermally destabilizing modification of the duplex within the first 9 nucleotide positions of the 5′ region of the antisense strand. In some embodiments, one or more thermally destabilizing modification(s) of the duplex is/are located in positions 2-5 and 8-9, or such as positions 4-8, from the 5′-end of the antisense strand. In some further embodiments, the thermally destabilizing modification(s) of the duplex is/are located at position 6, 7 or 8 from the 5′-end of the antisense strand. In still some further embodiments, the thermally destabilizing modification of the duplex is located at position 7 from the 5′-end of the antisense strand. In some embodiments, the thermally destabilizing modification of the duplex is located at position 2, 3, 4, 5 or 9 from the 5′-end of the antisense strand.

[0467] The thermally destabilizing modifications can include, but are not limited to, abasic modification; mismatch with the opposing nucleotide in the opposing strand; and sugar modification such as 2′-deoxy modification or acyclic nucleotide, e.g., unlocked nucleic acids (UNA); glycol nucleic acid (GNA); and 2′-5′-linked ribonucleotides (“3′-RNA”).

[0468] Exemplified abasic modifications include, but are not limited to the following:

[chemical structure]

### Wherein R═H, Me, Et or OMe; R′ ═H, Me, Et or OMe; R″═H, Me, Et or OMe

[chemical structure]

wherein B is a modified or unmodified nucleobase.

[0470] Exemplified sugar modifications include, but are not limited to the following:

[chemical structure]

wherein B is a modified or unmodified nucleobase.

[0471] In some embodiments the thermally destabilizing modification of the duplex is selected from the group consisting of:

[chemical structure]

wherein B is a modified or unmodified nucleobase and the asterisk on each structure represents either R, or racemic.

[0472] In some embodiments the thermally destabilizing modification of the duplex is selected from the group consisting of:

[chemical structure]

wherein B is a modified or unmodified nucleobase and the asterisk represents either R, S or racemic (e.g. S).

[0473] The term “acyclic nucleotide” refers to any nucleotide having an acyclic ribose sugar, for example, where any of bonds between the ribose carbons (e.g., C1′-C2′, C2′-C3′, C3′-C4′, C4′-O4′, or C1′-O4′) is absent or at least one of ribose carbons or oxygen (e.g., C1′, C2′, C3′, C4′, or O4′) are independently or in combination absent from the nucleotide. In some embodiments, acyclic nucleotide is

[chemical structure]

wherein B is a modified or unmodified nucleobase, R¹ and R² independently are H, halogen, OR₃, or alkyl; and R₃ is H, alkyl, cycloalkyl, aryl, aralkyl, heteroaryl or sugar). The term “UNA” refers to unlocked acyclic nucleic acid, wherein any of the bonds of the sugar has been removed, forming an unlocked “sugar” residue. In one example, UNA also encompasses monomers with bonds between C1′-C4′ being removed (i.e. the covalent carbon-oxygen-carbon bond between the C1′ and C4′ carbons). In another example, the C2′-C3′ bond (i.e. the covalent carbon-carbon bond between the C2′ and C3′ carbons) of the sugar is removed (see Mikhailov et. al., Tetrahedron Letters, 26 (17): 2059 (1985); and Fluiter et al., Mol. Biosyst., 10: 1039 (2009), which are hereby incorporated by reference in their entirety). The acyclic derivative provides greater backbone flexibility without affecting the Watson-Crick pairings. The acyclic nucleotide can be linked via 2′-5′ or 3′-5′ linkage.

[0474] The term ‘GNA’ refers to glycol nucleic acid which is a polymer similar to DNA or RNA but differing in the composition of its “backbone” in that is composed of repeating glycerol units linked by phosphodiester bonds:

[chemical structure]

[0475] The thermally destabilizing modification of the duplex can be mismatches (i.e., noncomplementary base pairs) between the thermally destabilizing nucleotide and the opposing nucleotide in the opposite strand within the dsRNA duplex. Exemplary mismatch base pairs include G:G, G:A, G:U, G:T, A:A, A:C, C:C, C:U, C:T, U:U, T:T, U:T, or a combination thereof. Other mismatch base pairings known in the art are also amenable to the present invention. A mismatch can occur between nucleotides that are either naturally occurring nucleotides or modified nucleotides, i.e., the mismatch base pairing can occur between the nucleobases from respective nucleotides independent of the modifications on the ribose sugars of the nucleotides. In certain embodiments, the dsRNA molecule contains at least one nucleobase in the mismatch pairing that is a 2′-deoxy nucleobase; e.g., the 2′-deoxy nucleobase is in the sense strand.

[0476] In some embodiments, the thermally destabilizing modification of the duplex in the seed region of the antisense strand includes nucleotides with impaired Watson-Crick hydrogen-bonding to the complementary base on the target mRNA, such as modified nucleobases:

[chemical structure]

[0477] More examples of abasic nucleotide, acyclic nucleotide modifications (including UNA and GNA), and mismatch modifications have been described in detail in WO 2011/133876, which is herein incorporated by reference in its entirety.

The thermally destabilizing modifications may also include universal base with reduced or abolished capability to form hydrogen bonds with the opposing bases, and phosphate modifications.

[0478] In some embodiments, the thermally destabilizing modification of the duplex includes nucleotides with non-canonical bases such as, but not limited to, nucleobase modifications with impaired or completely abolished capability to form hydrogen bonds with bases in the opposite strand. These nucleobase modifications have been evaluated for destabilization of the central region of the dsRNA duplex as described in WO 2010/0011895, which is herein incorporated by reference in its entirety. Exemplary nucleobase modifications are:

[chemical structure]

[0479] In some embodiments, the thermally destabilizing modification of the duplex in the seed region of the antisense strand includes one or more α-nucleotide complementary to the base on the target mRNA, such as:

[chemical structure]

wherein R is H, OH, OCH₃, F, NH₂, NHMe, NMe₂ or O-alkyl.

[0480] Exemplary phosphate modifications known to decrease the thermal stability of dsRNA duplexes compared to natural phosphodiester linkages are:

[chemical structure]

[0481] The alkyl for the R group can be a C_{I}-C₆alkyl. Specific alkyls for the R group include, but are not limited to methyl, ethyl, propyl, isopropyl, butyl, pentyl and hexyl.

[0482] As the skilled artisan will recognize, in view of the functional role of nucleobases is defining specificity of a RNAi agent of the disclosure, while nucleobase modifications can be performed in the various manners as described herein, e.g., to introduce destabilizing modifications into a RNAi agent of the disclosure, e.g., for purpose of enhancing on-target effect relative to off-target effect, the range of modifications available and, in general, present upon RNAi agents of the disclosure tends to be much greater for non-nucleobase modifications, e.g., modifications to sugar groups or phosphate backbones of polyribonucleotides. Such modifications are described in greater detail in other sections of the instant disclosure and are expressly contemplated for RNAi agents of the disclosure, either possessing native nucleobases or modified nucleobases as described above or elsewhere herein.

[0483] In addition to the antisense strand comprising a thermally destabilizing modification, the dsRNA can also comprise one or more stabilizing modifications. For example, the dsRNA can comprise at least two (e.g., two, three, four, five, six, seven, eight, nine, ten or more) stabilizing modifications. Without limitations, the stabilizing modifications all can be present in one strand. In some embodiments, both the sense and the antisense strands comprise at least two stabilizing modifications. The stabilizing modification can occur on any nucleotide of the sense strand or antisense strand. For instance, the stabilizing modification can occur on every nucleotide on the sense strand or antisense strand; each stabilizing modification can occur in an alternating pattern on the sense strand or antisense strand; or the sense strand or antisense strand comprises both stabilizing modification in an alternating pattern. The alternating pattern of the stabilizing modifications on the sense strand may be the same or different from the antisense strand, and the alternating pattern of the stabilizing modifications on the sense strand can have a shift relative to the alternating pattern of the stabilizing modifications on the antisense strand.

[0484] In some embodiments, the antisense strand comprises at least two (e.g., two, three, four, five, six, seven, eight, nine, ten or more) stabilizing modifications. Without limitations, a stabilizing modification in the antisense strand can be present at any positions. In some embodiments, the antisense comprises stabilizing modifications at positions 2, 6, 8, 9, 14, and 16 from the 5′-end. In some other embodiments, the antisense comprises stabilizing modifications at positions 2, 6, 14, and 16 from the 5′-end. In still some other embodiments, the antisense comprises stabilizing modifications at positions 2, 14, and 16 from the 5′-end.

[0485] In some embodiments, the antisense strand comprises at least one stabilizing modification adjacent to the destabilizing modification. For example, the stabilizing modification can be the nucleotide at the 5′-end or the 3′-end of the destabilizing modification, i.e., at position −1 or +1 from the position of the destabilizing modification. In some embodiments, the antisense strand comprises a stabilizing modification at each of the 5′-end and the 3′-end of the destabilizing modification, i.e., positions −1 and +1 from the position of the destabilizing modification.

[0486] In some embodiments, the antisense strand comprises at least two stabilizing modifications at the 3′-end of the destabilizing modification, i.e., at positions +1 and +2 from the position of the destabilizing modification.

[0487] In some embodiments, the sense strand comprises at least two (e.g., two, three, four, five, six, seven, eight, nine, ten or more) stabilizing modifications. Without limitations, a stabilizing modification in the sense strand can be present at any positions. In some embodiments, the sense strand comprises stabilizing modifications at positions 7, 10, and 11 from the 5′-end. In some other embodiments, the sense strand comprises stabilizing modifications at positions 7, 9, 10, and 11 from the 5′-end. In some embodiments, the sense strand comprises stabilizing modifications at positions opposite or complimentary to positions 11, 12, and 15 of the antisense strand, counting from the 5′-end of the antisense strand. In some other embodiments, the sense strand comprises stabilizing modifications at positions opposite or complimentary to positions 11, 12, 13, and 15 of the antisense strand, counting from the 5′-end of the antisense strand. In some embodiments, the sense strand comprises a block of two, three, or four stabilizing modifications.

[0488] In some embodiments, the sense strand does not comprise a stabilizing modification in position opposite or complimentary to the thermally destabilizing modification of the duplex in the antisense strand.

[0489] Exemplary thermally stabilizing modifications include, but are not limited to, 2′-fluoro modifications. Other thermally stabilizing modifications include, but are not limited to, LNA.

[0490] In some embodiments, the dsRNA of the disclosure comprises at least four (e.g., four, five, six, seven, eight, nine, ten, or more) 2′-fluoro nucleotides. Without limitations, the 2′-fluoro nucleotides all can be present in one strand. In some embodiments, both the sense and the antisense strands comprise at least two 2′-fluoro nucleotides. The 2′-fluoro modification can occur on any nucleotide of the sense strand or antisense strand. For instance, the 2′-fluoro modification can occur on every nucleotide on the sense strand or antisense strand; each 2′-fluoro modification can occur in an alternating pattern on the sense strand or antisense strand; or the sense strand or antisense strand comprises both 2′-fluoro modifications in an alternating pattern. The alternating pattern of the 2′-fluoro modifications on the sense strand may be the same or different from the antisense strand, and the alternating pattern of the 2′-fluoro modifications on the sense strand can have a shift relative to the alternating pattern of the 2′-fluoro modifications on the antisense strand.

[0491] In some embodiments, the antisense strand comprises at least two (e.g., two, three, four, five, six, seven, eight, nine, ten, or more) 2′-fluoro nucleotides. Without limitations, a 2′-fluoro modification in the antisense strand can be present at any positions. In some embodiments, the antisense comprises 2′-fluoro nucleotides at positions 2, 6, 8, 9, 14, and 16 from the 5′-end. In some other embodiments, the antisense comprises 2′-fluoro nucleotides at positions 2, 6, 14, and 16 from the 5′-end. In still some other embodiments, the antisense comprises 2′-fluoro nucleotides at positions 2, 14, and 16 from the 5′-end.

[0492] In some embodiments, the antisense strand comprises at least one 2′-fluoro nucleotide adjacent to the destabilizing modification. For example, the 2′-fluoro nucleotide can be the nucleotide at the 5′-end or the 3′-end of the destabilizing modification, i.e., at position −1 or +1 from the position of the destabilizing modification. In some embodiments, the antisense strand comprises a 2′-fluoro nucleotide at each of the 5′-end and the 3′-end of the destabilizing modification, i.e., positions −1 and +1 from the position of the destabilizing modification.

[0493] In some embodiments, the antisense strand comprises at least two 2′-fluoro nucleotides at the 3′-end of the destabilizing modification, i.e., at positions +1 and +2 from the position of the destabilizing modification.

[0494] In some embodiments, the sense strand comprises at least two (e.g., two, three, four, five, six, seven, eight, nine, ten, or more) 2′-fluoro nucleotides. Without limitations, a 2′-fluoro modification in the sense strand can be present at any positions. In some embodiments, the antisense comprises 2′-fluoro nucleotides at positions 7, 10, and 11 from the 5′-end. In some other embodiments, the sense strand comprises 2′-fluoro nucleotides at positions 7, 9, 10, and 11 from the 5′-end. In some embodiments, the sense strand comprises 2′-fluoro nucleotides at positions opposite or complimentary to positions 11, 12, and 15 of the antisense strand, counting from the 5′-end of the antisense strand. In some other embodiments, the sense strand comprises 2′-fluoro nucleotides at positions opposite or complimentary to positions 11, 12, 13, and 15 of the antisense strand, counting from the 5′-end of the antisense strand. In some embodiments, the sense strand comprises a block of two, three or four 2′-fluoro nucleotides.

[0495] In some embodiments, the sense strand does not comprise a 2′-fluoro nucleotide in position opposite or complimentary to the thermally destabilizing modification of the duplex in the antisense strand.

[0496] In some embodiments, the dsRNA molecule of the disclosure comprises a 21 nucleotides (nt) sense strand and a 23 nucleotides (nt) antisense, wherein the antisense strand contains at least one thermally destabilizing nucleotide, where the at least one thermally destabilizing nucleotide occurs in the seed region of the antisense strand (i.e., at position 2-9 of the 5′-end of the antisense strand, or at positions 2-8 of the 5′-end of the referenced strand), wherein one end of the dsRNA is blunt, while the other end is comprises a 2 nt overhang, and wherein the dsRNA optionally further has at least one (e.g., one, two, three, four, five, six or all seven) of the following characteristics: (i) the antisense comprises 2, 3, 4, 5, or 6 2′-fluoro modifications; (ii) the antisense comprises 1, 2, 3, 4, or 5 phosphorothioate internucleotide linkages; (iii) the sense strand is conjugated with a ligand; (iv) the sense strand comprises 2, 3, 4, or 5 2′-fluoro modifications; (v) the sense strand comprises 1, 2, 3, 4, or 5 phosphorothioate internucleotide linkages; (vi) the dsRNA comprises at least four 2′-fluoro modifications; and (vii) the dsRNA comprises a blunt end at 5′-end of the antisense strand. In another embodiment, the two nucleotide overhang is at the 3′-end of the antisense.

[0497] In some embodiments, the dsRNA molecule of the disclosure comprising a sense and antisense strands, wherein: the sense strand is 25-30 nucleotide residues in length, wherein starting from the 5′ terminal nucleotide (position 1), positions 1 to 23 of said sense strand comprise at least 8 ribonucleotides; antisense strand is 36-66 nucleotide residues in length and, starting from the 3′ terminal nucleotide, at least 8 ribonucleotides in the positions paired with positions 1-23 of sense strand to form a duplex; wherein at least the 3′terminal nucleotide of antisense strand is unpaired with sense strand, and up to 6 consecutive 3′ terminal nucleotides are unpaired with sense strand, thereby forming a 3′ single stranded overhang of 1-6 nucleotides; wherein the 5′ terminus of antisense strand comprises from 10-30 consecutive nucleotides which are unpaired with sense strand, thereby forming a 10-30 nucleotide single stranded 5′ overhang; wherein at least the sense strand 5′ terminal and 3′ terminal nucleotides are base paired with nucleotides of antisense strand when sense and antisense strands are aligned for maximum complementarity, thereby forming a substantially duplexed region between sense and antisense strands; and antisense strand is sufficiently complementary to a target RNA along at least 19 ribonucleotides of antisense strand length to reduce target gene expression when said double stranded nucleic acid is introduced into a mammalian cell; and wherein the antisense strand contains at least one thermally destabilizing nucleotide, where at least one thermally destabilizing nucleotide is in the seed region of the antisense strand (i.e. at position 2-9 of the 5′-end of the antisense strand, at positions 2-8 of the 5′-end of the referenced strand). For example, the thermally destabilizing nucleotide occurs between positions opposite or complimentary to positions 14-17 of the 5′-end of the sense strand, and wherein the dsRNA optionally further has at least one (e.g., one, two, three, four, five, six or all seven) of the following characteristics: (i) the antisense comprises 2, 3, 4, 5, or 6 2′-fluoro modifications; (ii) the antisense comprises 1, 2, 3, 4, or 5 phosphorothioate internucleotide linkages; (iii) the sense strand is conjugated with a ligand; (iv) the sense strand comprises 2, 3, 4, or 5 2′-fluoro modifications; (v) the sense strand comprises 1, 2, 3, 4, or 5 phosphorothioate internucleotide linkages; and (vi) the dsRNA comprises at least four 2′-fluoro modifications; and (vii) the dsRNA comprises a duplex region of 12-30 nucleotide pairs in length.

[0498] In some embodiments, the dsRNA molecule of the disclosure comprises a sense and antisense strands, wherein said dsRNA molecule comprises a sense strand having a length which is at least 25 and at most 29 nucleotides and an antisense strand having a length which is at most 30 nucleotides with the sense strand comprises a modified nucleotide that is susceptible to enzymatic degradation at position 11 from the 5′end, wherein the 3′ end of said sense strand and the 5′ end of said antisense strand form a blunt end and said antisense strand is 1-4 nucleotides longer at its 3′ end than the sense strand, wherein the duplex region which is at least 25 nucleotides in length, and said antisense strand is sufficiently complementary to a target mRNA along at least 19 nt of said antisense strand length to reduce target gene expression when said dsRNA molecule is introduced into a mammalian cell, and wherein dicer cleavage of said dsRNA results in an siRNA comprising said 3′ end of said antisense strand, thereby reducing expression of the target gene in the mammal, wherein the antisense strand contains at least one thermally destabilizing nucleotide, where the at least one thermally destabilizing nucleotide is in the seed region of the antisense strand (i.e. at position 2-9 of the 5′-end of the antisense strand, or at positions 2-8 of the 5′-end of the referenced strand), and wherein the dsRNA optionally further has at least one (e.g., one, two, three, four, five, six or all seven) of the following characteristics: (i) the antisense comprises 2, 3, 4, 5, or 6 2′-fluoro modifications; (ii) the antisense comprises 1, 2, 3, 4, or 5 phosphorothioate internucleotide linkages; (iii) the sense strand is conjugated with a ligand; (iv) the sense strand comprises 2, 3, 4, or 5 2′-fluoro modifications; (v) the sense strand comprises 1, 2, 3, 4, or 5 phosphorothioate internucleotide linkages; and (vi) the dsRNA comprises at least four 2′-fluoro modifications; and (vii) the dsRNA has a duplex region of 12-29 nucleotide pairs in length.

[0499] In some embodiments, every nucleotide in the sense strand and antisense strand of the dsRNA molecule may be modified. Each nucleotide may be modified with the same or different modification which can include one or more alteration of one or both of the non-linking phosphate oxygens or of one or more of the linking phosphate oxygens; alteration of a constituent of the ribose sugar, e.g., of the 2′ hydroxyl on the ribose sugar; wholesale replacement of the phosphate moiety with “dephospho” linkers; modification or replacement of a naturally occurring base; and replacement or modification of the ribose-phosphate backbone.

[0500] As nucleic acids are polymers of subunits, many of the modifications occur at a position which is repeated within a nucleic acid, e.g., a modification of a base, or a phosphate moiety, or a non-linking O of a phosphate moiety. In some cases, the modification will occur at all of the subject positions in the nucleic acid but in many cases it will not. By way of example, a modification may only occur at a 3′ or 5′ terminal position, may only occur in a terminal region, e.g., at a position on a terminal nucleotide or in the last 2, 3, 4, 5, or 10 nucleotides of a strand. A modification may occur in a double strand region, a single strand region, or in both. A modification may occur only in the double strand region of an RNA or may only occur in a single strand region of an RNA. E.g., a phosphorothioate modification at a non-linking O position may only occur at one or both termini, may only occur in a terminal region, e.g., at a position on a terminal nucleotide or in the last 2, 3, 4, 5, or 10 nucleotides of a strand, or may occur in double strand and single strand regions, particularly at termini. The 5′ end or ends can be phosphorylated.

[0501] It may be possible, e.g., to enhance stability, to include particular bases in overhangs, or to include modified nucleotides or nucleotide surrogates, in single strand overhangs, e.g., in a 5′ or 3′ overhang, or in both. E.g., it can be desirable to include purine nucleotides in overhangs. In some embodiments all or some of the bases in a 3′ or 5′ overhang may be modified, e.g., with a modification described herein. Modifications can include, e.g., the use of modifications at the 2′ position of the ribose sugar with modifications that are known in the art, e.g., the use of deoxyribonucleotides, 2′-deoxy-2′-fluoro (2′-F) or 2′-O-methyl modified instead of the ribosugar of the nucleobase, and modifications in the phosphate group, e.g., phosphorothioate modifications. Overhangs need not be homologous with the target sequence.

[0502] In some embodiments, each residue of the sense strand and antisense strand is independently modified with LNA, HNA, CeNA, 2′-methoxyethyl, 2′-O-methyl, 2′-O-allyl, 2′-C-allyl, 2′-deoxy, or 2′-fluoro. The strands can contain more than one modification. In some embodiments, each residue of the sense strand and antisense strand is independently modified with 2′-O-methyl or 2′-fluoro. It is to be understood that these modifications are in addition to the at least one thermally destabilizing modification of the duplex present in the antisense strand.

[0503] At least two different modifications are typically present on the sense strand and antisense strand. Those two modifications may be the 2′-deoxy, 2′-O-methyl or 2′-fluoro modifications, acyclic nucleotides or others. In some embodiments, the sense strand and antisense strand each comprises two differently modified nucleotides selected from 2′-O-methyl or 2′-deoxy. In some embodiments, each residue of the sense strand and antisense strand is independently modified with 2′-O-methyl nucleotide, 2′-deoxy nucleotide, 2′-deoxy-2′-fluoro nucleotide, 2′-O—N-methylacetamido (2′-O-NMA, 2′O—CH2C(O)N(Me)H) nucleotide, a 2′-O-dimethylaminoethoxyethyl (2′-O-DMAEOE) nucleotide, 2′-O-aminopropyl (2′-O-AP) nucleotide, or 2′-ara-F nucleotide. Again, it is to be understood that these modifications are in addition to the at least one thermally destabilizing modification of the duplex present in the antisense strand.

[0504] In some embodiments, the dsRNA molecule of the disclosure comprises modifications of an alternating pattern. The term “alternating motif” or “alternative pattern” as used herein refers to a motif having one or more modifications, each modification occurring on alternating nucleotides of one strand. The alternating nucleotide may refer to one per every other nucleotide or one per every three nucleotides, or a similar pattern. For example, if A, B and C each represent one type of modification to the nucleotide, the alternating motif can be “ABABABABABAB . . . ,” “AABBAABBAABB . . . ,” “AABAABAABAAB . . . ,” “AAABAAABAAAB . . . ,” “AAABBBAAABBB . . . ,” or “ABCABCABCABC . . . ,” etc.

The type of modifications contained in the alternating motif may be the same or different. For example, if A, B, C, D each represent one type of modification on the nucleotide, the alternating pattern, i.e., modifications on every other nucleotide, may be the same, but each of the sense strand or antisense strand can be selected from several possibilities of modifications within the alternating motif such as “ABABAB . . . ”, “ACACAC . . . ” “BDBDBD . . . ” or “CDCDCD . . . ,” etc.

[0505] In some embodiments, the dsRNA molecule of the disclosure comprises the modification pattern for the alternating motif on the sense strand relative to the modification pattern for the alternating motif on the antisense strand is shifted. The shift may be such that the modified group of nucleotides of the sense strand corresponds to a differently modified group of nucleotides of the antisense strand and vice versa. For example, the sense strand when paired with the antisense strand in the dsRNA duplex, the alternating motif in the sense strand may start with “ABABAB” from 5′-3′ of the strand and the alternating motif in the antisense strand may start with “BABABA” from 3′-5′ of the strand within the duplex region. As another example, the alternating motif in the sense strand may start with “AABBAABB” from 5′-3′ of the strand and the alternating motif in the antisense strand may start with “BBAABBAA” from 3′-5′ of the strand within the duplex region, so that there is a complete or partial shift of the modification patterns between the sense strand and the antisense strand.

[0506] In one particular example, the alternating motif in the sense strand is “ABABAB” sfrom 5′ 3′ of the strand, where each A is an unmodified ribonucleotide and each B is a 2′-Omethyl modified nucleotide.

[0507] In one particular example, the alternating motif in the sense strand is “ABABAB” sfrom 5′ 3′ of the strand, where each A is an 2′-deoxy-2′-fluoro modified nucleotide and each B is a 2′-Omethyl modified nucleotide.

[0508] In another particular example, the alternating motif in the antisense strand is “BABABA” from 3′-5′ of the strand, where each A is a 2′-deoxy-2′-fluoro modified nucleotide and each B is a 2′-Omethyl modified nucleotide.

[0509] In one particular example, the alternating motif in the sense strand is “ABABAB” sfrom 5′ 3′ of the strand and the alternating motif in the antisense strand is “BABABA” from 3′-5′ of the strand, where each A is an unmodified ribonucleotide and each B is a 2′-Omethyl modified nucleotide.

[0510] In one particular example, the alternating motif in the sense strand is “ABABAB” sfrom 5′ 3′ of the strand and the alternating motif in the antisense strand is “BABABA” from 3′-5′ of the strand, where each A is a 2′-deoxy-2′-fluoro modified nucleotide and each B is a 2′-Omethyl modified nucleotide.

[0511] The dsRNA molecule of the disclosure may further comprise at least one phosphorothioate or methylphosphonate internucleotide linkage. The phosphorothioate or methylphosphonate internucleotide linkage modification may occur on any nucleotide of the sense strand or antisense strand or both in any position of the strand. For instance, the internucleotide linkage modification may occur on every nucleotide on the sense strand or antisense strand; each internucleotide linkage modification may occur in an alternating pattern on the sense strand or antisense strand; or the sense strand or antisense strand comprises both internucleotide linkage modifications in an alternating pattern. The alternating pattern of the internucleotide linkage modification on the sense strand may be the same or different from the antisense strand, and the alternating pattern of the internucleotide linkage modification on the sense strand may have a shift relative to the alternating pattern of the internucleotide linkage modification on the antisense strand.

[0512] In some embodiments, the dsRNA molecule comprises the phosphorothioate or methylphosphonate internucleotide linkage modification in the overhang region. For example, the overhang region comprises two nucleotides having a phosphorothioate or methylphosphonate internucleotide linkage between the two nucleotides. Internucleotide linkage modifications also may be made to link the overhang nucleotides with the terminal paired nucleotides within duplex region. For example, at least 2, 3, 4, or all the overhang nucleotides may be linked through phosphorothioate or methylphosphonate internucleotide linkage, and optionally, there may be additional phosphorothioate or methylphosphonate internucleotide linkages linking the overhang nucleotide with a paired nucleotide that is next to the overhang nucleotide. For instance, there may be at least two phosphorothioate internucleotide linkages between the terminal three nucleotides, in which two of the three nucleotides are overhang nucleotides, and the third is a paired nucleotide next to the overhang nucleotide. In one embodiment, these terminal three nucleotides may be at the 3′-end of the antisense strand.

[0513] In some embodiments, the sense strand of the dsRNA molecule comprises 1-10 blocks of two to ten phosphorothioate or methylphosphonate internucleotide linkages separated by 1, 2, 3, 4, 5, 6, 7, 8, 9, 10, 11, 12, 13, 14, 15, or 16 phosphate internucleotide linkages, wherein one of the phosphorothioate or methylphosphonate internucleotide linkages is placed at any position in the oligonucleotide sequence and the said sense strand is paired with an antisense strand comprising any combination of phosphorothioate, methylphosphonate and phosphate internucleotide linkages or an antisense strand comprising either phosphorothioate or methylphosphonate or phosphate linkage.

[0514] In some embodiments, the antisense strand of the dsRNA molecule comprises two blocks of two phosphorothioate or methylphosphonate internucleotide linkages separated by 1, 2, 3, 4, 5, 6, 7, 8, 9, 10, 11, 12, 13, 14, 15, 16, 17, or 18 phosphate internucleotide linkages, wherein one of the phosphorothioate or methylphosphonate internucleotide linkages is placed at any position in the oligonucleotide sequence and the said antisense strand is paired with a sense strand comprising any combination of phosphorothioate, methylphosphonate and phosphate internucleotide linkages or an antisense strand comprising either phosphorothioate or methylphosphonate or phosphate linkage.

[0515] In some embodiments, the antisense strand of the dsRNA molecule comprises two blocks of three phosphorothioate or methylphosphonate internucleotide linkages separated by 1, 2, 3, 4, 5, 6, 7, 8, 9, 10, 11, 12, 13, 14, 15, or 16 phosphate internucleotide linkages, wherein one of the phosphorothioate or methylphosphonate internucleotide linkages is placed at any position in the oligonucleotide sequence and the said antisense strand is paired with a sense strand comprising any combination of phosphorothioate, methylphosphonate and phosphate internucleotide linkages or an antisense strand comprising either phosphorothioate or methylphosphonate or phosphate linkage.

[0516] In some embodiments, the antisense strand of the dsRNA molecule comprises two blocks of four phosphorothioate or methylphosphonate internucleotide linkages separated by 1, 2, 3, 4, 5, 6, 7, 8, 9, 10, 11, 12, 13, or 14 phosphate internucleotide linkages, wherein one of the phosphorothioate or methylphosphonate internucleotide linkages is placed at any position in the oligonucleotide sequence and the said antisense strand is paired with a sense strand comprising any combination of phosphorothioate, methylphosphonate and phosphate internucleotide linkages or an antisense strand comprising either phosphorothioate or methylphosphonate or phosphate linkage.

[0517] In some embodiments, the antisense strand of the dsRNA molecule comprises two blocks of five phosphorothioate or methylphosphonate internucleotide linkages separated by 1, 2, 3, 4, 5, 6, 7, 8, 9, 10, 11, or 12 phosphate internucleotide linkages, wherein one of the phosphorothioate or methylphosphonate internucleotide linkages is placed at any position in the oligonucleotide sequence and the said antisense strand is paired with a sense strand comprising any combination of phosphorothioate, methylphosphonate and phosphate internucleotide linkages or an antisense strand comprising either phosphorothioate or methylphosphonate or phosphate linkage.

[0518] In some embodiments, the antisense strand of the dsRNA molecule comprises two blocks of six phosphorothioate or methylphosphonate internucleotide linkages separated by 1, 2, 3, 4, 5, 6, 7, 8, 9, or 10 phosphate internucleotide linkages, wherein one of the phosphorothioate or methylphosphonate internucleotide linkages is placed at any position in the oligonucleotide sequence and the said antisense strand is paired with a sense strand comprising any combination of phosphorothioate, methylphosphonate and phosphate internucleotide linkages or an antisense strand comprising either phosphorothioate or methylphosphonate or phosphate linkage.

[0519] In some embodiments, the antisense strand of the dsRNA molecule comprises two blocks of seven phosphorothioate or methylphosphonate internucleotide linkages separated by 1, 2, 3, 4, 5, 6, 7, or 8 phosphate internucleotide linkages, wherein one of the phosphorothioate or methylphosphonate internucleotide linkages is placed at any position in the oligonucleotide sequence and the said antisense strand is paired with a sense strand comprising any combination of phosphorothioate, methylphosphonate and phosphate internucleotide linkages or an antisense strand comprising either phosphorothioate or methylphosphonate or phosphate linkage.

[0520] In some embodiments, the antisense strand of the dsRNA molecule comprises two blocks of eight phosphorothioate or methylphosphonate internucleotide linkages separated by 1, 2, 3, 4, 5, or 6 phosphate internucleotide linkages, wherein one of the phosphorothioate or methylphosphonate internucleotide linkages is placed at any position in the oligonucleotide sequence and the said antisense strand is paired with a sense strand comprising any combination of phosphorothioate, methylphosphonate and phosphate internucleotide linkages or an antisense strand comprising either phosphorothioate or methylphosphonate or phosphate linkage.

[0521] In some embodiments, the antisense strand of the dsRNA molecule comprises two blocks of nine phosphorothioate or methylphosphonate internucleotide linkages separated by 1, 2, 3, or 4 phosphate internucleotide linkages, wherein one of the phosphorothioate or methylphosphonate internucleotide linkages is placed at any position in the oligonucleotide sequence and the said antisense strand is paired with a sense strand comprising any combination of phosphorothioate, methylphosphonate and phosphate internucleotide linkages or an antisense strand comprising either phosphorothioate or methylphosphonate or phosphate linkage.

[0522] In some embodiments, the dsRNA molecule of the disclosure further comprises one or more phosphorothioate or methylphosphonate internucleotide linkage modification within 1-10 nucleotides of the termini position(s) of the sense or antisense strand. For example, at least 2, 3, 4, 5, 6, 7, 8, 9, or 10 nucleotides may be linked through phosphorothioate or methylphosphonate internucleotide linkage at one end or both ends of the sense or antisense strand.

[0523] In some embodiments, the dsRNA molecule of the disclosure further comprises one or more phosphorothioate or methylphosphonate internucleotide linkage modification within 1-10 nucleotides of the internal region of the duplex of each of the sense or antisense strand. For example, at least nucleotides 2, 3, 4, 5, 6, 7, 8, 9, or 10 nucleotides may be linked through phosphorothioate or methylphosphonate internucleotide linkage at position 8-16 of the duplex region counting from the 5′-end of the sense strand; the dsRNA molecule can optionally further comprise one or more phosphorothioate or methylphosphonate internucleotide linkage modification within 1-10 of the termini position(s).

[0524] In some embodiments, the dsRNA molecule of the disclosure further comprises one to five phosphorothioate or methylphosphonate internucleotide linkage modification(s) within position 1-5 and one to five phosphorothioate or methylphosphonate internucleotide linkage modification(s) within position 18-23 of the sense strand (counting from the 5′-end), and one to two phosphorothioate or methylphosphonate internucleotide linkage modification at positions 1 and 2 and one to five within positions 18-23 of the antisense strand (counting from the 5′-end).

[0525] In some embodiments, the dsRNA molecule of the disclosure further comprises one phosphorothioate internucleotide linkage modification within position 1-5 and one phosphorothioate or methylphosphonate internucleotide linkage modification within position 18-23 of the sense strand (counting from the 5′-end), and one phosphorothioate internucleotide linkage modification at positions 1 or 2 and two phosphorothioate or methylphosphonate internucleotide linkage modifications within positions 18-23 of the antisense strand (counting from the 5′-end).

[0526] In some embodiments, the dsRNA molecule of the disclosure further comprises two phosphorothioate internucleotide linkage modifications within position 1-5 and one phosphorothioate internucleotide linkage modification within position 18-23 of the sense strand (counting from the 5′-end), and one phosphorothioate internucleotide linkage modification at positions 1 or 2 and two phosphorothioate internucleotide linkage modifications within positions 18-23 of the antisense strand (counting from the 5′-end).

[0527] In some embodiments, the dsRNA molecule of the disclosure further comprises two phosphorothioate internucleotide linkage modifications within position 1-5 and two phosphorothioate internucleotide linkage modifications within position 18-23 of the sense strand (counting from the 5′-end), and one phosphorothioate internucleotide linkage modification at positions 1 or 2 and two phosphorothioate internucleotide linkage modifications within positions 18-23 of the antisense strand (counting from the 5′-end).

[0528] In some embodiments, the dsRNA molecule of the disclosure further comprises two phosphorothioate internucleotide linkage modifications within position 1-5 and two phosphorothioate internucleotide linkage modifications within position 18-23 of the sense strand (counting from the 5′-end), and one phosphorothioate internucleotide linkage modification at positions 1 or 2 and one phosphorothioate internucleotide linkage modification within positions 18-23 of the antisense strand (counting from the 5′-end).

[0529] In some embodiments, the dsRNA molecule of the disclosure further comprises one phosphorothioate internucleotide linkage modification within position 1-5 and one phosphorothioate internucleotide linkage modification within position 18-23 of the sense strand (counting from the 5′-end), and two phosphorothioate internucleotide linkage modifications at positions 1 and 2 and two phosphorothioate internucleotide linkage modifications within positions 18-23 of the antisense strand (counting from the 5′-end).

[0530] In some embodiments, the dsRNA molecule of the disclosure further comprises one phosphorothioate internucleotide linkage modification within position 1-5 and one within position 18-23 of the sense strand (counting from the 5′-end), and two phosphorothioate internucleotide linkage modification at positions 1 and 2 and one phosphorothioate internucleotide linkage modification within positions 18-23 of the antisense strand (counting from the 5′-end).

[0531] In some embodiments, the dsRNA molecule of the disclosure further comprises one phosphorothioate internucleotide linkage modification within position 1-5 (counting from the 5′-end) of the sense strand, and two phosphorothioate internucleotide linkage modifications at positions 1 and 2 and one phosphorothioate internucleotide linkage modification within positions 18-23 of the antisense strand (counting from the 5′-end).

[0532] In some embodiments, the dsRNA molecule of the disclosure further comprises two phosphorothioate internucleotide linkage modifications within position 1-5 (counting from the 5′-end) of the sense strand, and one phosphorothioate internucleotide linkage modification at positions 1 and 2 and two phosphorothioate internucleotide linkage modifications within positions 18-23 of the antisense strand (counting from the 5′-end).

[0533] In some embodiments, the dsRNA molecule of the disclosure further comprises two phosphorothioate internucleotide linkage modifications within position 1-5 and one within position 18-23 of the sense strand (counting from the 5′-end), and two phosphorothioate internucleotide linkage modifications at positions 1 and 2 and one phosphorothioate internucleotide linkage modification within positions 18-23 of the antisense strand (counting from the 5′-end).

[0534] In some embodiments, the dsRNA molecule of the disclosure further comprises two phosphorothioate internucleotide linkage modifications within position 1-5 and one phosphorothioate internucleotide linkage modification within position 18-23 of the sense strand (counting from the 5′-end), and two phosphorothioate internucleotide linkage modifications at positions 1 and 2 and two phosphorothioate internucleotide linkage modifications within positions 18-23 of the antisense strand (counting from the 5′-end).

[0535] In some embodiments, the dsRNA molecule of the disclosure further comprises two phosphorothioate internucleotide linkage modifications within position 1-5 and one phosphorothioate internucleotide linkage modification within position 18-23 of the sense strand (counting from the 5′-end), and one phosphorothioate internucleotide linkage modification at positions 1 and 2 and two phosphorothioate internucleotide linkage modifications within positions 18-23 of the antisense strand (counting from the 5′-end).

[0536] In some embodiments, the dsRNA molecule of the disclosure further comprises two phosphorothioate internucleotide linkage modifications at position 1 and 2, and two phosphorothioate internucleotide linkage modifications at position 20 and 21 of the sense strand (counting from the 5′-end), and one phosphorothioate internucleotide linkage modification at positions 1 and one at position 21 of the antisense strand (counting from the 5′-end).

[0537] In some embodiments, the dsRNA molecule of the disclosure further comprises one phosphorothioate internucleotide linkage modification at position 1, and one phosphorothioate internucleotide linkage modification at position 21 of the sense strand (counting from the 5′-end), and two phosphorothioate internucleotide linkage modifications at positions 1 and 2 and two phosphorothioate internucleotide linkage modifications at positions 20 and 21 the antisense strand (counting from the 5′-end).

[0538] In some embodiments, the dsRNA molecule of the disclosure further comprises two phosphorothioate internucleotide linkage modifications at position 1 and 2, and two phosphorothioate internucleotide linkage modifications at position 21 and 22 of the sense strand (counting from the 5′-end), and one phosphorothioate internucleotide linkage modification at positions 1 and one phosphorothioate internucleotide linkage modification at position 21 of the antisense strand (counting from the 5′-end).

[0539] In some embodiments, the dsRNA molecule of the disclosure further comprises one phosphorothioate internucleotide linkage modification at position 1, and one phosphorothioate internucleotide linkage modification at position 21 of the sense strand (counting from the 5′-end), and two phosphorothioate internucleotide linkage modifications at positions 1 and 2 and two phosphorothioate internucleotide linkage modifications at positions 21 and 22 the antisense strand (counting from the 5′-end).

[0540] In some embodiments, the dsRNA molecule of the disclosure further comprises two phosphorothioate internucleotide linkage modifications at position 1 and 2, and two phosphorothioate internucleotide linkage modifications at position 22 and 23 of the sense strand (counting from the 5′-end), and one phosphorothioate internucleotide linkage modification at positions 1 and one phosphorothioate internucleotide linkage modification at position 21 of the antisense strand (counting from the 5′-end).

[0541] In some embodiments, the dsRNA molecule of the disclosure further comprises one phosphorothioate internucleotide linkage modification at position 1, and one phosphorothioate internucleotide linkage modification at position 21 of the sense strand (counting from the 5′-end), and two phosphorothioate internucleotide linkage modifications at positions 1 and 2 and two phosphorothioate internucleotide linkage modifications at positions 23 and 23 the antisense strand (counting from the 5′-end).

[0542] In some embodiments, compound of the disclosure comprises a pattern of backbone chiral centers. In some embodiments, a common pattern of backbone chiral centers comprises at least 5 internucleotidic linkages in the Sp configuration. In some embodiments, a common pattern of backbone chiral centers comprises at least 6 internucleotidic linkages in the Sp configuration. In some embodiments, a common pattern of backbone chiral centers comprises at least 7 internucleotidic linkages in the Sp configuration. In some embodiments, a common pattern of backbone chiral centers comprises at least 8 internucleotidic linkages in the Sp configuration. In some embodiments, a common pattern of backbone chiral centers comprises at least 9 internucleotidic linkages in the Sp configuration. In some embodiments, a common pattern of backbone chiral centers comprises at least 10 internucleotidic linkages in the Sp configuration. In some embodiments, a common pattern of backbone chiral centers comprises at least 11 internucleotidic linkages in the Sp configuration. In some embodiments, a common pattern of backbone chiral centers comprises at least 12 internucleotidic linkages in the Sp configuration. In some embodiments, a common pattern of backbone chiral centers comprises at least 13 internucleotidic linkages in the Sp configuration. In some embodiments, a common pattern of backbone chiral centers comprises at least 14 internucleotidic linkages in the Sp configuration. In some embodiments, a common pattern of backbone chiral centers comprises at least 15 internucleotidic linkages in the Sp configuration. In some embodiments, a common pattern of backbone chiral centers comprises at least 16 internucleotidic linkages in the Sp configuration. In some embodiments, a common pattern of backbone chiral centers comprises at least 17 internucleotidic linkages in the Sp configuration. In some embodiments, a common pattern of backbone chiral centers comprises at least 18 internucleotidic linkages in the Sp configuration. In some embodiments, a common pattern of backbone chiral centers comprises at least 19 internucleotidic linkages in the Sp configuration. In some embodiments, a common pattern of backbone chiral centers comprises no more than 8 internucleotidic linkages in the Rp configuration. In some embodiments, a common pattern of backbone chiral centers comprises no more than 7 internucleotidic linkages in the Rp configuration. In some embodiments, a common pattern of backbone chiral centers comprises no more than 6 internucleotidic linkages in the Rp configuration. In some embodiments, a common pattern of backbone chiral centers comprises no more than 5 internucleotidic linkages in the Rp configuration. In some embodiments, a common pattern of backbone chiral centers comprises no more than 4 internucleotidic linkages in the Rp configuration. In some embodiments, a common pattern of backbone chiral centers comprises no more than 3 internucleotidic linkages in the Rp configuration. In some embodiments, a common pattern of backbone chiral centers comprises no more than 2 internucleotidic linkages in the Rp configuration. In some embodiments, a common pattern of backbone chiral centers comprises no more than 1 internucleotidic linkages in the Rp configuration. In some embodiments, a common pattern of backbone chiral centers comprises no more than 8 internucleotidic linkages which are not chiral (as a non-limiting example, a phosphodiester). In some embodiments, a common pattern of backbone chiral centers comprises no more than 7 internucleotidic linkages which are not chiral. In some embodiments, a common pattern of backbone chiral centers comprises no more than 6 internucleotidic linkages which are not chiral. In some embodiments, a common pattern of backbone chiral centers comprises no more than 5 internucleotidic linkages which are not chiral. In some embodiments, a common pattern of backbone chiral centers comprises no more than 4 internucleotidic linkages which are not chiral. In some embodiments, a common pattern of backbone chiral centers comprises no more than 3 internucleotidic linkages which are not chiral. In some embodiments, a common pattern of backbone chiral centers comprises no more than 2 internucleotidic linkages which are not chiral. In some embodiments, a common pattern of backbone chiral centers comprises no more than 1 internucleotidic linkages which are not chiral. In some embodiments, a common pattern of backbone chiral centers comprises at least 10 internucleotidic linkages in the Sp configuration, and no more than 8 internucleotidic linkages which are not chiral. In some embodiments, a common pattern of backbone chiral centers comprises at least 11 internucleotidic linkages in the Sp configuration, and no more than 7 internucleotidic linkages which are not chiral. In some embodiments, a common pattern of backbone chiral centers comprises at least 12 internucleotidic linkages in the Sp configuration, and no more than 6 internucleotidic linkages which are not chiral. In some embodiments, a common pattern of backbone chiral centers comprises at least 13 internucleotidic linkages in the Sp configuration, and no more than 6 internucleotidic linkages which are not chiral. In some embodiments, a common pattern of backbone chiral centers comprises at least 14 internucleotidic linkages in the Sp configuration, and no more than 5 internucleotidic linkages which are not chiral. In some embodiments, a common pattern of backbone chiral centers comprises at least 15 internucleotidic linkages in the Sp configuration, and no more than 4 internucleotidic linkages which are not chiral. In some embodiments, the internucleotidic linkages in the Sp configuration are optionally contiguous or not contiguous. In some embodiments, the internucleotidic linkages in the Rp configuration are optionally contiguous or not contiguous. In some embodiments, the internucleotidic linkages which are not chiral are optionally contiguous or not contiguous.

[0543] In some embodiments, compound of the disclosure comprises a block that is a stereochemistry block. In some embodiments, a block is an Rp block in that each internucleotidic linkage of the block is Rp. In some embodiments, a 5′-block is an Rp block. In some embodiments, a 3′-block is an Rp block. In some embodiments, a block is an Sp block in that each internucleotidic linkage of the block is Sp. In some embodiments, a 5′-block is an Sp block. In some embodiments, a 3′-block is an Sp block. In some embodiments, provided oligonucleotides comprise both Rp and Sp blocks. In some embodiments, provided oligonucleotides comprise one or more Rp but no Sp blocks. In some embodiments, provided oligonucleotides comprise one or more Sp but no Rp blocks. In some embodiments, provided oligonucleotides comprise one or more PO blocks wherein each internucleotidic linkage in a natural phosphate linkage.

[0544] In some embodiments, compound of the disclosure comprises a 5′-block that is an Sp block wherein each sugar moiety comprises a 2′-F modification. In some embodiments, a 5′-block is an Sp block wherein each of internucleotidic linkage is a modified internucleotidic linkage and each sugar moiety comprises a 2′-F modification. In some embodiments, a 5′-block is an Sp block wherein each of internucleotidic linkage is a phosphorothioate linkage and each sugar moiety comprises a 2′-F modification. In some embodiments, a 5′-block comprises 4 or more nucleoside units. In some embodiments, a 5′-block comprises 5 or more nucleoside units. In some embodiments, a 5′-block comprises 6 or more nucleoside units. In some embodiments, a 5′-block comprises 7 or more nucleoside units. In some embodiments, a 3′-block is an Sp block wherein each sugar moiety comprises a 2′-F modification. In some embodiments, a 3′-block is an Sp block wherein each of internucleotidic linkage is a modified internucleotidic linkage and each sugar moiety comprises a 2′-F modification. In some embodiments, a 3′-block is an Sp block wherein each of internucleotidic linkage is a phosphorothioate linkage and each sugar moiety comprises a 2′-F modification. In some embodiments, a 3′-block comprises 4 or more nucleoside units. In some embodiments, a 3′-block comprises 5 or more nucleoside units. In some embodiments, a 3′-block comprises 6 or more nucleoside units. In some embodiments, a 3′-block comprises 7 or more nucleoside units.

[0545] In some embodiments, compound of the disclosure comprises a type of nucleoside in a region or an oligonucleotide is followed by a specific type of internucleotidic linkage, e.g., natural phosphate linkage, modified internucleotidic linkage, Rp chiral internucleotidic linkage, Sp chiral internucleotidic linkage, etc. In some embodiments, A is followed by Sp. In some embodiments, A is followed by Rp. In some embodiments, A is followed by natural phosphate linkage (PO). In some embodiments, U is followed by Sp. In some embodiments, U is followed by Rp. In some embodiments, U is followed by natural phosphate linkage (PO). In some embodiments, C is followed by Sp. In some embodiments, C is followed by Rp. In some embodiments, C is followed by natural phosphate linkage (PO). In some embodiments, G is followed by Sp. In some embodiments, G is followed by Rp. In some embodiments, G is followed by natural phosphate linkage (PO). In some embodiments, C and U are followed by Sp. In some embodiments, C and U are followed by Rp. In some embodiments, C and U are followed by natural phosphate linkage (PO). In some embodiments, A and G are followed by Sp. In some embodiments, A and G are followed by Rp.

[0546] In some embodiments, the antisense strand comprises phosphorothioate internucleotide linkages between nucleotide positions 21 and 22, and between nucleotide positions 22 and 23, wherein the antisense strand contains at least one thermally destabilizing modification of the duplex located in the seed region of the antisense strand (i.e., at position 2-9 of the 5′-end of the antisense strand, or at positions 2-8 of the 5′-end of the referenced strand), and wherein the dsRNA optionally further has at least one (e.g., one, two, three, four, five, six, seven or all eight) of the following characteristics: (i) the antisense comprises 2, 3, 4, 5, or 6 2′-fluoro modifications; (ii) the antisense comprises 3, 4, or 5 phosphorothioate internucleotide linkages; (iii) the sense strand is conjugated with a ligand; (iv) the sense strand comprises 2, 3, 4 or 5 2′-fluoro modifications; (v) the sense strand comprises 1, 2, 3, 4, or 5 phosphorothioate internucleotide linkages; (vi) the dsRNA comprises at least four 2′-fluoro modifications; (vii) the dsRNA comprises a duplex region of 12-40 nucleotide pairs in length; and (viii) the dsRNA has a blunt end at 5′-end of the antisense strand.

In some embodiments, the antisense strand comprises phosphorothioate internucleotide linkages between nucleotide positions 1 and 2, between nucleotide positions 2 and 3, between nucleotide positions 21 and 22, and between nucleotide positions 22 and 23, wherein the antisense strand contains at least one thermally destabilizing modification of the duplex located in the seed region of the antisense strand (i.e., at position 2-9 of the 5′-end of the antisense strand, or at positions 2-8 of the 5′-end of the referenced strand), and wherein the dsRNA optionally further has at least one (e.g., one, two, three, four, five, six, seven or all eight) of the following characteristics: (i) the antisense comprises 2, 3, 4, 5, or 6 2′-fluoro modifications; (ii) the sense strand is conjugated with a ligand; (iii) the sense strand comprises 2, 3, 4 or 5 2′-fluoro modifications; (iv) the sense strand comprises 1, 2, 3, 4, or 5 phosphorothioate internucleotide linkages; (v) the dsRNA comprises at least four 2′-fluoro modifications; (vi) the dsRNA comprises a duplex region of 12-40 nucleotide pairs in length; (vii) the dsRNA comprises a duplex region of 12-40 nucleotide pairs in length; and (viii) the dsRNA has a blunt end at 5′-end of the antisense strand.

[0547] In some embodiments, the sense strand comprises phosphorothioate internucleotide linkages between nucleotide positions 1 and 2, and between nucleotide positions 2 and 3, wherein the antisense strand contains at least one thermally destabilizing modification of the duplex located in the seed region of the antisense strand (i.e., at position 2-9 of the 5′-end of the antisense strand, or at positions 2-8 of the 5′-end of the referenced strand), and wherein the dsRNA optionally further has at least one (e.g., one, two, three, four, five, six, seven or all eight) of the following characteristics: (i) the antisense comprises 2, 3, 4, 5, or 6 2′-fluoro modifications; (ii) the antisense comprises 1, 2, 3, 4, or 5 phosphorothioate internucleotide linkages; (iii) the sense strand is conjugated with a ligand; (iv) the sense strand comprises 2, 3, 4 or 5 2′-fluoro modifications; (v) the sense strand comprises 3, 4 or 5 phosphorothioate internucleotide linkages; (vi) the dsRNA comprises at least four 2′-fluoro modifications; (vii) the dsRNA comprises a duplex region of 12-40 nucleotide pairs in length; and (viii) the dsRNA has a blunt end at 5′-end of the antisense strand.

[0548] In some embodiments, the sense strand comprises phosphorothioate internucleotide linkages between nucleotide positions 1 and 2, and between nucleotide positions 2 and 3, the antisense strand comprises phosphorothioate internucleotide linkages between nucleotide positions 1 and 2, between nucleotide positions 2 and 3, between nucleotide positions 21 and 22, and between nucleotide positions 22 and 23, wherein the antisense strand contains at least one thermally destabilizing modification of the duplex located in the seed region of the antisense strand (i.e., at position 2-9 of the 5′-end of the antisense strand, or at positions 2-8 of the 5′-end of the referenced strand), and wherein the dsRNA optionally further has at least one (e.g., one, two, three, four, five, six or all seven) of the following characteristics: (i) the antisense comprises 2, 3, 4, 5 or 6 2′-fluoro modifications; (ii) the sense strand is conjugated with a ligand; (iii) the sense strand comprises 2, 3, 4 or 5 2′-fluoro modifications; (iv) the sense strand comprises 3, 4 or 5 phosphorothioate internucleotide linkages; (v) the dsRNA comprises at least four 2′-fluoro modifications; (vi) the dsRNA comprises a duplex region of 12-40 nucleotide pairs in length; and (vii) the dsRNA has a blunt end at 5′-end of the antisense strand.

[0549] In some embodiments, the dsRNA molecule of the disclosure comprises mismatch(es) with the target, within the duplex, or combinations thereof. The mismatch can occur in the overhang region or the duplex region. The base pair can be ranked on the basis of their propensity to promote dissociation or melting (e.g., on the free energy of association or dissociation of a particular pairing, the simplest approach is to examine the pairs on an individual pair basis, though next neighbor or similar analysis can also be used). In terms of promoting dissociation: A:U is preferred over G:C; G:U is preferred over G:C; and J:C is preferred over G:C (I=inosine). Mismatches, e.g., non-canonical or other than canonical pairings (as described elsewhere herein) are preferred over canonical (A:T, A:U, G:C) pairings; and pairings which include a universal base are preferred over canonical pairings.

[0550] In some embodiments, the dsRNA molecule of the disclosure comprises at least one of the first 1, 2, 3, 4, or 5 base pairs within the duplex regions from the 5′-end of the antisense strand can be chosen independently from the group of: A:U, G:U, I:C, and mismatched pairs, e.g., non-canonical or other than canonical pairings or pairings which include a universal base, to promote the dissociation of the antisense strand at the 5′-end of the duplex.

[0551] In some embodiments, the nucleotide at the 1 position within the duplex region from the 5′-end in the antisense strand is selected from the group consisting of A, dA, dU, U, and dT. Alternatively, at least one of the first 1, 2 or 3 base pair within the duplex region from the 5′-end of the antisense strand is an AU base pair. For example, the first base pair within the duplex region from the 5′-end of the antisense strand is an AU base pair.

[0552] It was found that introducing 4′-modified or 5′-modified nucleotide to the 3′-end of a phosphodiester (PO), phosphorothioate (PS), or phosphorodithioate (PS2) linkage of a nucleotide at any position of single stranded or double stranded oligonucleotide can exert steric effect to the internucleotide linkage and, hence, protecting or stabilizing it against nucleases.

[0553] In some embodiments, 5′-modified nucleotide is introduced at the 3′-end of a dinucleotide at any position of single stranded or double stranded siRNA. For instance, a 5′-alkylated nucleotide may be introduced at the 3′-end of a dinucleotide at any position of single stranded or double stranded siRNA. The alkyl group at the 5′ position of the ribose sugar can be racemic or chirally pure R or S isomer. An exemplary 5′-alkylated nucleotide is 5′-methyl nucleoside. The 5′-methyl can be either racemic or chirally pure R or S isomer.

[0554] In some embodiments, 4′-modified nucleotide is introduced at the 3′-end of a dinucleotide at any position of single stranded or double stranded siRNA. For instance, a 4′-alkylated nucleotide may be introduced at the 3′-end of a dinucleotide at any position of single stranded or double stranded siRNA. The alkyl group at the 4′ position of the ribose sugar can be racemic or chirally pure R or S isomer. An exemplary 4′-alkylated nucleotide is 4′-methyl nucleotide. The 4′-methyl can be either racemic or chirally pure R or S isomer. Alternatively, a 4′-O-alkylated nucleotide may be introduced at the 3′-end of a dinucleotide at any position of single stranded or double stranded siRNA. The 4′-O-alkyl of the ribose sugar can be racemic or chirally pure R or S isomer. An exemplary 4′-O-alkylated nucleotide is 4′-O-methyl nucleotide. The 4′-O-methyl can be either racemic or chirally pure R or S isomer.

[0555] In some embodiments, 5′-alkylated nucleotide is introduced at any position on the sense strand or antisense strand of a dsRNA, and such modification maintains or improves potency of the dsRNA. The 5′-alkyl can be either racemic or chirally pure R or S isomer. An exemplary 5′-alkylated nucleotide is 5′-methyl nucleotide. The 5′-methyl can be either racemic or chirally pure R or S isomer.

[0556] In some embodiments, 4′-alkylated nucleotide is introduced at any position on the sense strand or antisense strand of a dsRNA, and such modification maintains or improves potency of the dsRNA. The 4′-alkyl can be either racemic or chirally pure R or S isomer. An exemplary 4′-alkylated nucleotide is 4′-methyl nucleotide. The 4′-methyl can be either racemic or chirally pure R or S isomer.

[0557] In some embodiments, 4′-O-alkylated nucleotide is introduced at any position on the sense strand or antisense strand of a dsRNA, and such modification maintains or improves potency of the dsRNA. The 5′-alkyl can be either racemic or chirally pure R or S isomer. An exemplary 4′-O-alkylated nucleotide is 4′-O-methyl nucleotide. The 4′-O-methyl can be either racemic or chirally pure R or S isomer.

[0558] In some embodiments, the dsRNA molecule of the disclosure can comprise 2′-5′ linkages (with 2′-H, 2′-OH and 2′-OMe and with P═O or P═S). For example, the 2′-5′ linkages modifications can be used to promote nuclease resistance or to inhibit binding of the sense to the antisense strand, or can be used at the 5′ end of the sense strand to avoid sense strand activation by RISC.

[0559] In another embodiment, the dsRNA molecule of the disclosure can comprise L sugars (e.g., L ribose, L-arabinose with 2′-H, 2′-OH and 2′-OMe). For example, these L sugars modifications can be used to promote nuclease resistance or to inhibit binding of the sense to the antisense strand, or can be used at the 5′ end of the sense strand to avoid sense strand activation by RISC.

[0560] Various publications describe multimeric siRNA which can all be used with the dsRNA of the disclosure. Such publications include WO2007/091269, U.S. Pat. No. 7,858,769, WO2010/141511, WO2007/117686, WO2009/014887, and WO2011/031520 which are hereby incorporated by their entirely.

[0561] As described in more detail below, the RNAi agent that contains conjugations of one or more carbohydrate moieties to an RNAi agent can optimize one or more properties of the RNAi agent. In many cases, the carbohydrate moiety will be attached to a modified subunit of the RNAi agent. For example, the ribose sugar of one or more ribonucleotide subunits of a dsRNA agent can be replaced with another moiety, e.g., a non-carbohydrate (such as, cyclic) carrier to which is attached a carbohydrate ligand. A ribonucleotide subunit in which the ribose sugar of the subunit has been so replaced is referred to herein as a ribose replacement modification subunit (RRMS). A cyclic carrier may be a carbocyclic ring system, i.e., all ring atoms are carbon atoms, or a heterocyclic ring system, i.e., one or more ring atoms may be a heteroatom, e.g., nitrogen, oxygen, sulfur. The cyclic carrier may be a monocyclic ring system, or may contain two or more rings, e.g. fused rings. The cyclic carrier may be a fully saturated ring system, or it may contain one or more double bonds.

[0562] The ligand may be attached to the polynucleotide via a carrier. The carriers include (i) at least one “backbone attachment point,” such as two “backbone attachment points” and (ii) at least one “tethering attachment point.” A “backbone attachment point” as used herein refers to a functional group, e.g. a hydroxyl group, or generally, a bond available for, and that is suitable for incorporation of the carrier into the backbone, e.g., the phosphate, or modified phosphate, e.g., sulfur containing, backbone, of a ribonucleic acid. A “tethering attachment point” (TAP) in some embodiments refers to a constituent ring atom of the cyclic carrier, e.g., a carbon atom or a heteroatom (distinct from an atom which provides a backbone attachment point), that connects a selected moiety. The moiety can be, e.g., a carbohydrate, e.g. monosaccharide, disaccharide, trisaccharide, tetrasaccharide, oligosaccharide and polysaccharide. Optionally, the selected moiety is connected by an intervening tether to the cyclic carrier. Thus, the cyclic carrier will often include a functional group, e.g., an amino group, or generally, provide a bond, that is suitable for incorporation or tethering of another chemical entity, e.g., a ligand to the constituent ring.

[0563] The RNAi agents may be conjugated to a ligand via a carrier, wherein the carrier can be cyclic group or acyclic group. For example, the cyclic group can be selected from pyrrolidinyl, pyrazolinyl, pyrazolidinyl, imidazolinyl, imidazolidinyl, piperidinyl, piperazinyl, [1,3]dioxolane, oxazolidinyl, isoxazolidinyl, morpholinyl, thiazolidinyl, isothiazolidinyl, quinoxalinyl, pyridazinonyl, tetrahydrofuryl and decalin. The acyclic group is selected from, for example, serinol backbone or diethanolamine backbone.

[0564] In certain specific embodiments, the RNAi agent for use in the methods of the disclosure is an agent selected from the group of agents listed in any one of Tables 2-5 and 8-9. These agents may further comprise a ligand, such as one or more lipophilic moieties, one or more GalNAc derivatives, or both of one of more lipophilic moieties and one or more GalNAc derivatives.

### IV. iRNAs Conjugated to Ligands

[0565] Another modification of the RNA of an iRNA of the invention involves chemically linking to the iRNA one or more ligands, moieties or conjugates that enhance the activity, cellular distribution or cellular uptake of the iRNA, e.g., into a cell. Such moieties include but are not limited to lipid moieties such as a cholesterol moiety (Letsinger et al., Proc. Natl. Acid. Sci. USA, 1989, 86: 6553-6556), cholic acid (Manoharan et al., Biorg. Med. Chem. Let., 1994, 4:1053-1060), a thioether, e.g., beryl-S-tritylthiol (Manoharan et al., Ann. N.Y. Acad. Sci., 1992, 660:306-309; Manoharan et al., Biorg. Med. Chem. Let., 1993, 3:2765-2770), a thiocholesterol (Oberhauser et al., Nucl. Acids Res., 1992, 20:533-538), an aliphatic chain, e.g., dodecandiol or undecyl residues (Saison-Behmoaras et al., EMBO J, 1991, 10:1111-1118; Kabanov et al., FEBS Lett., 1990, 259:327-330; Svinarchuk et al., Biochimie, 1993, 75:49-54), a phospholipid, e.g., di-hexadecyl-rac-glycerol or triethyl-ammonium 1,2-di-O-hexadecyl-rac-glycero-3-phosphonate (Manoharan et al., Tetrahedron Lett., 1995, 36:3651-3654; Shea et al., Nucl. Acids Res., 1990, 18:3777-3783), a polyamine or a polyethylene glycol chain (Manoharan et al., Nucleosides & Nucleotides, 1995, 14:969-973), or adamantane acetic acid (Manoharan et al., Tetrahedron Lett., 1995, 36:3651-3654), a palmityl moiety (Mishra et al., Biochim. Biophys. Acta, 1995, 1264:229-237), or an octadecylamine or hexylamino-carbonyloxycholesterol moiety (Crooke et al., J. Pharmacol. Exp. Ther., 1996, 277:923-937).

[0566] In certain embodiments, a ligand alters the distribution, targeting or lifetime of an iRNA agent into which it is incorporated. In some embodiments, a ligand provides an enhanced affinity for a selected target, e.g., molecule, cell or cell type, compartment, e.g., a cellular or organ compartment, tissue, organ or region of the body, as, e.g., compared to a species absent such a ligand. Typical ligands will not take part in duplex pairing in a duplexed nucleic acid.

[0567] Ligands can include a naturally occurring substance, such as a protein (e.g., human serum albumin (HSA), low-density lipoprotein (LDL), or globulin); carbohydrate (e.g., a dextran, pullulan, chitin, chitosan, inulin, cyclodextrin or hyaluronic acid); or a lipid. The ligand may also be a recombinant or synthetic molecule, such as a synthetic polymer, e.g., a synthetic polyamino acid. Examples of polyamino acids include polyamino acid is a polylysine (PLL), poly L-aspartic acid, poly L-glutamic acid, styrene-maleic acid anhydride copolymer, poly(L-lactide-co-glycolied) copolymer, divinyl ether-maleic anhydride copolymer, N-(2-hydroxypropyl)methacrylamide copolymer (HMPA), polyethylene glycol (PEG), polyvinyl alcohol (PVA), polyurethane, poly(2-ethylacryllic acid), N-isopropylacrylamide polymers, or polyphosphazine. Example of polyamines include: polyethylenimine, polylysine (PLL), spermine, spermidine, polyamine, pseudopeptide-polyamine, peptidomimetic polyamine, dendrimer polyamine, arginine, amidine, protamine, cationic lipid, cationic porphyrin, quaternary salt of a polyamine, or an a helical peptide.

[0568] Ligands can also include targeting groups, e.g., a cell or tissue targeting agent, e.g., a lectin, glycoprotein, lipid or protein, e.g., an antibody, that binds to a specified cell type such as a kidney cell. A targeting group can be a thyrotropin, melanotropin, lectin, glycoprotein, surfactant protein A, Mucin carbohydrate, multivalent lactose, multivalent galactose, N-acetyl-galactosamine, N-acetyl-glucosamine multivalent mannose, multivalent fucose, glycosylated polyaminoacids, multivalent galactose, transferrin, bisphosphonate, polyglutamate, polyaspartate, a lipid, cholesterol, a steroid, bile acid, folate, vitamin B12, biotin, or an RGD peptide or RGD peptide mimetic. In certain embodiments, the ligand is a multivalent galactose, e.g., an N-acetyl-galactosamine.

[0569] Other examples of ligands include dyes, intercalating agents (e.g. acridines), cross-linkers (e.g. psoralene, mitomycin C), porphyrins (TPPC4, texaphyrin, Sapphyrin), polycyclic aromatic hydrocarbons (e.g., phenazine, dihydrophenazine), artificial endonucleases (e.g. EDTA), lipophilic molecules, e.g., cholesterol, cholic acid, adamantane acetic acid, 1-pyrene butyric acid, dihydrotestosterone, 1,3-Bis-O(hexadecyl)glycerol, geranyloxyhexyl group, hexadecylglycerol, borneol, menthol, 1,3-propanediol, heptadecyl group, palmitic acid, myristic acid,O3-(oleoyl)lithocholic acid, 03-(oleoyl)cholenic acid, dimethoxytrityl, or phenoxazine) and peptide conjugates (e.g., antennapedia peptide, Tat peptide), alkylating agents, phosphate, amino, mercapto, PEG (e.g., PEG-40K), MPEG, [MPEG]₂, polyamino, alkyl, substituted alkyl, radiolabeled markers, enzymes, haptens (e.g. biotin), transport/absorption facilitators (e.g., aspirin, vitamin E, folic acid), synthetic ribonucleases (e.g., imidazole, bisimidazole, histamine, imidazole clusters, acridine-imidazole conjugates, Eu3+ complexes of tetraazamacrocycles), dinitrophenyl, HRP, or AP.

[0570] Ligands can be proteins, e.g., glycoproteins, or peptides, e.g., molecules having a specific affinity for a co-ligand, or antibodies e.g., an antibody, that binds to a specified cell type such as a cancer cell, endothelial cell, or bone cell. Ligands may also include hormones and hormone receptors. They can also include non-peptidic species, such as lipids, lectins, carbohydrates, vitamins, cofactors, multivalent lactose, multivalent galactose, N-acetyl-galactosamine, N-acetyl-glucosamine multivalent mannose, or multivalent fucose. The ligand can be, for example, a lipopolysaccharide, an activator of p38 MAP kinase, or an activator of NF-κB.

[0571] The ligand can be a substance, e.g., a drug, which can increase the uptake of the iRNA agent into the cell, for example, by disrupting the cell's cytoskeleton, e.g., by disrupting the cell's microtubules, microfilaments, or intermediate filaments. The drug can be, for example, taxon, vincristine, vinblastine, cytochalasin, nocodazole, japlakinolide, latrunculin A, phalloidin, swinholide A, indanocine, or myoservin.

[0572] In some embodiments, a ligand attached to an iRNA as described herein acts as a pharmacokinetic modulator (PK modulator). PK modulators include lipophiles, bile acids, steroids, phospholipid analogues, peptides, protein binding agents, PEG, vitamins etc. Exemplary PK modulators include, but are not limited to, cholesterol, fatty acids, cholic acid, lithocholic acid, dialkylglycerides, diacylglyceride, phospholipids, sphingolipids, naproxen, ibuprofen, vitamin E, biotin etc. Oligonucleotides that comprise a number of phosphorothioate linkages are also known to bind to serum protein, thus short oligonucleotides, e.g., oligonucleotides of about 5 bases, 10 bases, 15 bases or 20 bases, comprising multiple of phosphorothioate linkages in the backbone are also amenable to the present invention as ligands (e.g. as PK modulating ligands). In addition, aptamers that bind serum components (e.g. serum proteins) are also suitable for use as PK modulating ligands in the embodiments described herein.

[0573] Ligand-conjugated iRNAs of the invention may be synthesized by the use of an oligonucleotide that bears a pendant reactive functionality, such as that derived from the attachment of a linking molecule onto the oligonucleotide (described below). This reactive oligonucleotide may be reacted directly with commercially-available ligands, ligands that are synthesized bearing any of a variety of protecting groups, or ligands that have a linking moiety attached thereto.

[0574] The oligonucleotides used in the conjugates of the present invention may be conveniently and routinely made through the well-known technique of solid-phase synthesis. Equipment for such synthesis is sold by several vendors including, for example, Applied Biosystems® (Foster City, Calif.). Any other means for such synthesis known in the art may additionally or alternatively be employed. It is also known to use similar techniques to prepare other oligonucleotides, such as the phosphorothioates and alkylated derivatives.

[0575] In the ligand-conjugated oligonucleotides and ligand-molecule bearing sequence-specific linked nucleosides of the present invention, the oligonucleotides and oligonucleosides may be assembled on a suitable DNA synthesizer utilizing standard nucleotide or nucleoside precursors, or nucleotide or nucleoside conjugate precursors that already bear the linking moiety, ligand-nucleotide or nucleoside-conjugate precursors that already bear the ligand molecule, or non-nucleoside ligand-bearing building blocks.

[0576] When using nucleotide-conjugate precursors that already bear a linking moiety, the synthesis of the sequence-specific linked nucleosides is typically completed, and the ligand molecule is then reacted with the linking moiety to form the ligand-conjugated oligonucleotide. In some embodiments, the oligonucleotides or linked nucleosides of the present invention are synthesized by an automated synthesizer using phosphoramidites derived from ligand-nucleoside conjugates in addition to the standard phosphoramidites and non-standard phosphoramidites that are commercially available and routinely used in oligonucleotide synthesis.

[0577] A. Lipid Conjugates

[0578] In certain embodiments, the ligand or conjugate is a lipid or lipid-based molecule. Such a lipid or lipid-based molecule can typically bind a serum protein, such as human serum albumin (HSA). An HSA binding ligand allows for distribution of the conjugate to a target tissue, e.g., a non-kidney target tissue of the body. For example, the target tissue can be the liver, including parenchymal cells of the liver. Other molecules that can bind HSA can also be used as ligands. For example, naproxen or aspirin can be used. A lipid or lipid-based ligand can (a) increase resistance to degradation of the conjugate, (b) increase targeting or transport into a target cell or cell membrane, or (c) can be used to adjust binding to a serum protein, e.g., HSA.

[0579] A lipid-based ligand can be used to modulate, e.g., control (e.g., inhibit) the binding of the conjugate to a target tissue. For example, a lipid or lipid-based ligand that binds to HSA more strongly will be less likely to be targeted to the kidney and therefore less likely to be cleared from the body. A lipid or lipid-based ligand that binds to HSA less strongly can be used to target the conjugate to the kidney.

[0580] In certain embodiments, the lipid-based ligand binds HSA. For example, the ligand can bind HSA with a sufficient affinity such that distribution of the conjugate to a non-kidney tissue is enhanced. However, the affinity is typically not so strong that the HSA-ligand binding cannot be reversed.

[0581] In certain embodiments, the lipid-based ligand binds HSA weakly or not at all, such that distribution of the conjugate to the kidney is enhanced. Other moieties that target to kidney cells can also be used in place of or in addition to the lipid-based ligand.

[0582] In another aspect, the ligand is a moiety, e.g., a vitamin, which is taken up by a target cell, e.g., a proliferating cell. These are particularly useful for treating disorders characterized by unwanted cell proliferation, e.g., of the malignant or non-malignant type, e.g., cancer cells. Exemplary vitamins include vitamin A, E, and K. Other exemplary vitamins include are B vitamin, e.g., folic acid, B12, riboflavin, biotin, pyridoxal or other vitamins or nutrients taken up by cancer cells. Also included are HSA and low density lipoprotein (LDL).

[0583] B. Cell Permeation Agents

[0584] In another aspect, the ligand is a cell-permeation agent, such as a helical cell-permeation agent. In certain embodiments, the agent is amphipathic. An exemplary agent is a peptide such as tat or antennopedia. If the agent is a peptide, it can be modified, including a peptidylmimetic, invertomers, non-peptide or pseudo-peptide linkages, and use of D-amino acids. The helical agent is typically an α-helical agent and can have a lipophilic and a lipophobic phase.

[0585] The ligand can be a peptide or peptidomimetic. A peptidomimetic (also referred to herein as an oligopeptidomimetic) is a molecule capable of folding into a defined three-dimensional structure similar to a natural peptide. The attachment of peptide and peptidomimetics to iRNA agents can affect pharmacokinetic distribution of the iRNA, such as by enhancing cellular recognition and absorption. The peptide or peptidomimetic moiety can be about 5-50 amino acids long, e.g., about 5, 10, 15, 20, 25, 30, 35, 40, 45, or 50 amino acids long.

[0586] A peptide or peptidomimetic can be, for example, a cell permeation peptide, cationic peptide, amphipathic peptide, or hydrophobic peptide (e.g., consisting primarily of Tyr, Trp, or Phe). The peptide moiety can be a dendrimer peptide, constrained peptide or crosslinked peptide. In another alternative, the peptide moiety can include a hydrophobic membrane translocation sequence (MTS). An exemplary hydrophobic MTS-containing peptide is RFGF having the amino acid sequence AAVALLPAVLLALLAP (SEQ ID NO: 9). An RFGF analogue (e.g., amino acid sequence AALLPVLLAAP (SEQ ID NO: 10)) containing a hydrophobic MTS can also be a targeting moiety. The peptide moiety can be a “delivery” peptide, which can carry large polar molecules including peptides, oligonucleotides, and protein across cell membranes. For example, sequences from the HIV Tat protein (GRKKRRQRRRPPQ (SEQ ID NO: 11)) and the Drosophila Antennapedia protein (RQIKIWFQNRRMKWKK (SEQ ID NO: 12)) have been found to be capable of functioning as delivery peptides. A peptide or peptidomimetic can be encoded by a random sequence of DNA, such as a peptide identified from a phage-display library, or one-bead-one-compound (OBOC) combinatorial library (Lam et al., Nature, 354:82-84, 1991). Typically, the peptide or peptidomimetic tethered to a dsRNA agent via an incorporated monomer unit is a cell targeting peptide such as an arginine-glycine-aspartic acid (RGD)-peptide, or RGD mimic. A peptide moiety can range in length from about 5 amino acids to about 40 amino acids. The peptide moieties can have a structural modification, such as to increase stability or direct conformational properties. Any of the structural modifications described below can be utilized.

[0587] An RGD peptide for use in the compositions and methods of the invention may be linear or cyclic, and may be modified, e.g., glycosylated or methylated, to facilitate targeting to a specific tissue(s). RGD-containing peptides and peptidiomimemtics may include D-amino acids, as well as synthetic RGD mimics. In addition to RGD, one can use other moieties that target the integrin ligand, such as PECAM-1 or VEGF.

[0588] An RGD peptide moiety can be used to target a particular cell type, e.g., a tumor cell, such as an endothelial tumor cell or a breast cancer tumor cell (Zitzmann et al., Cancer Res., 62:5139-43, 2002). An RGD peptide can facilitate targeting of an dsRNA agent to tumors of a variety of other tissues, including the lung, kidney, spleen, or liver (Aoki et al., Cancer Gene Therapy 8:783-787, 2001). Typically, the RGD peptide will facilitate targeting of an iRNA agent to the kidney. The RGD peptide can be linear or cyclic, and can be modified, e.g., glycosylated or methylated to facilitate targeting to specific tissues. For example, a glycosylated RGD peptide can deliver an iRNA agent to a tumor cell expressing αᵥβ₃ (Haubner et al., Jour. Nucl. Med., 42:326-336, 2001).

[0589] A “cell permeation peptide” is capable of permeating a cell, e.g., a microbial cell, such as a bacterial or fungal cell, or a mammalian cell, such as a human cell. A microbial cell-permeating peptide can be, for example, an α-helical linear peptide (e.g., LL-37 or Ceropin P1), a disulfide bond-containing peptide (e.g., α-defensin, β-defensin or bactenecin), or a peptide containing only one or two dominating amino acids (e.g., PR-39 or indolicidin). A cell permeation peptide can also include a nuclear localization signal (NLS). For example, a cell permeation peptide can be a bipartite amphipathic peptide, such as MPG, which is derived from the fusion peptide domain of HIV-1 gp41 and the NLS of SV40 large T antigen (Simeoni et al., Nucl. Acids Res. 31:2717-2724, 2003).

[0590] C. Carbohydrate Conjugates

[0591] In some embodiments of the compositions and methods of the invention, an iRNA further comprises a carbohydrate. The carbohydrate conjugated iRNA are advantageous for the in vivo delivery of nucleic acids, as well as compositions suitable for in vivo therapeutic use, as described herein. As used herein, “carbohydrate” refers to a compound which is either a carbohydrate per se made up of one or more monosaccharide units having at least 6 carbon atoms (which can be linear, branched or cyclic) with an oxygen, nitrogen or sulfur atom bonded to each carbon atom; or a compound having as a part thereof a carbohydrate moiety made up of one or more monosaccharide units each having at least six carbon atoms (which can be linear, branched or cyclic), with an oxygen, nitrogen or sulfur atom bonded to each carbon atom. Representative carbohydrates include the sugars (mono-, di-, tri- and oligosaccharides containing from about 4, 5, 6, 7, 8, or 9 monosaccharide units), and polysaccharides such as starches, glycogen, cellulose and polysaccharide gums. Specific monosaccharides include C5 and above (e.g., C5, C6, C7, or C8) sugars; di- and tri-saccharides include sugars having two or three monosaccharide units (e.g., C5, C6, C7, or C8).

[0592] In certain embodiments, a carbohydrate conjugate comprises a monosaccharide.

[0593] In certain embodiments, the monosaccharide is an N-acetylgalactosamine (GalNAc). GalNAc conjugates, which comprise one or more N-acetylgalactosamine (GalNAc) derivatives, are described, for example, in U.S. Pat. No. 8,106,022, the entire content of which is hereby incorporated herein by reference. In some embodiments, the GalNAc conjugate serves as a ligand that targets the iRNA to particular cells. In some embodiments, the GalNAc conjugate targets the iRNA to liver cells, e.g., by serving as a ligand for the asialoglycoprotein receptor of liver cells (e.g., hepatocytes).

[0594] In some embodiments, the carbohydrate conjugate comprises one or more GalNAc derivatives. The GalNAc derivatives may be attached via a linker, e.g., a bivalent or trivalent branched linker. In some embodiments the GalNAc conjugate is conjugated to the 3′ end of the sense strand. In some embodiments, the GalNAc conjugate is conjugated to the iRNA agent (e.g., to the 3′ end of the sense strand) via a linker, e.g., a linker as described herein. In some embodiments the GalNAc conjugate is conjugated to the 5′ end of the sense strand. In some embodiments, the GalNAc conjugate is conjugated to the iRNA agent (e.g., to the 5′ end of the sense strand) via a linker, e.g., a linker as described herein.

[0595] In certain embodiments of the invention, the GalNAc or GalNAc derivative is attached to an iRNA agent of the invention via a monovalent linker. In some embodiments, the GalNAc or GalNAc derivative is attached to an iRNA agent of the invention via a bivalent linker. In yet other embodiments of the invention, the GalNAc or GalNAc derivative is attached to an iRNA agent of the invention via a trivalent linker. In other embodiments of the invention, the GalNAc or GalNAc derivative is attached to an iRNA agent of the invention via a tetravalent linker.

[0596] In certain embodiments, the double stranded RNAi agents of the invention comprise one GalNAc or GalNAc derivative attached to the iRNA agent. In certain embodiments, the double stranded RNAi agents of the invention comprise a plurality (e.g., 2, 3, 4, 5, or 6) of GalNAc or GalNAc derivatives, each independently attached to a plurality of nucleotides of the double stranded RNAi agent through a plurality of monovalent linkers.

[0597] In some embodiments, for example, when the two strands of an iRNA agent of the invention are part of one larger molecule connected by an uninterrupted chain of nucleotides between the 3′-end of one strand and the 5′-end of the respective other strand forming a hairpin loop comprising, a plurality of unpaired nucleotides, each unpaired nucleotide within the hairpin loop may independently comprise a GalNAc or GalNAc derivative attached via a monovalent linker. The hairpin loop may also be formed by an extended overhang in one strand of the duplex.

[0598] In some embodiments, for example, when the two strands of an iRNA agent of the invention are part of one larger molecule connected by an uninterrupted chain of nucleotides between the 3′-end of one strand and the 5′-end of the respective other strand forming a hairpin loop comprising, a plurality of unpaired nucleotides, each unpaired nucleotide within the hairpin loop may independently comprise a GalNAc or GalNAc derivative attached via a monovalent linker. The hairpin loop may also be formed by an extended overhang in one strand of the duplex.

[0599] In some embodiments, the GalNAc conjugate is

[chemical structure]

[0600] In some embodiments, the RNAi agent is attached to the carbohydrate conjugate via a linker as shown in the following schematic, wherein X is O or S

[chemical structure]

[0601] In some embodiments, the RNAi agent is conjugated to L96 as defined in Table 1 and shown below:

[chemical structure]

[0602] In certain embodiments, a carbohydrate conjugate for use in the compositions and methods of the invention is selected from the group consisting of:

[chemical structure]

[chemical structure]

[chemical structure]

[chemical structure]

[chemical structure]

[chemical structure]

[chemical structure]

[chemical structure]

[0603] In certain embodiments, a carbohydrate conjugate for use in the compositions and methods of the invention is a monosaccharide. In certain embodiments, the monosaccharide is an N-acetylgalactosamine, such as

[chemical structure]

[0604] Another representative carbohydrate conjugate for use in the embodiments described herein includes, but is not limited to,

[chemical structure]

[0605] when one of X or Y is an oligonucleotide, the other is a hydrogen.

[0606] In some embodiments, a suitable ligand is a ligand disclosed in WO 2019/055633, the entire contents of which are incorporated herein by reference. In one embodiment the ligand comprises the structure below:

[chemical structure]

[0607] In certain embodiments, the RNAi agents of the disclosure may include GalNAc ligands, even if such GalNAc ligands are currently projected to be of limited value for the intrathecal/intracerebroventricular/CNS delivery route(s) of the instant disclosure.

[0608] In certain embodiments of the invention, the GalNAc or GalNAc derivative is attached to an iRNA agent of the invention via a monovalent linker. In some embodiments, the GalNAc or GalNAc derivative is attached to an iRNA agent of the invention via a bivalent linker. In yet other embodiments of the invention, the GalNAc or GalNAc derivative is attached to an iRNA agent of the invention via a trivalent linker. In other embodiments of the invention, the GalNAc or GalNAc derivative is attached to an iRNA agent of the invention via a tetravalent linker.

[0609] In certain embodiments, the double stranded RNAi agents of the invention comprise one GalNAc or GalNAc derivative attached to the iRNA agent, e.g., the 5′end of the sense strand of a dsRNA agent, or the 5′ end of one or both sense strands of a dual targeting RNAi agent as described herein. In certain embodiments, the double stranded RNAi agents of the invention comprise a plurality (e.g., 2, 3, 4, 5, or 6) GalNAc or GalNAc derivatives, each independently attached to a plurality of nucleotides of the double stranded RNAi agent through a plurality of monovalent linkers.

[0610] In some embodiments, for example, when the two strands of an iRNA agent of the invention are part of one larger molecule connected by an uninterrupted chain of nucleotides between the 3′-end of one strand and the 5′-end of the respective other strand forming a hairpin loop comprising, a plurality of unpaired nucleotides, each unpaired nucleotide within the hairpin loop may independently comprise a GalNAc or GalNAc derivative attached via a monovalent linker.

[0611] In some embodiments, the carbohydrate conjugate further comprises one or more additional ligands as described above, such as, but not limited to, a PK modulator or a cell permeation peptide.

[0612] Additional carbohydrate conjugates and linkers suitable for use in the present invention include those described in WO 2014/179620 and WO 2014/179627, the entire contents of each of which are incorporated herein by reference.

[0613] D. Linkers

[0614] In some embodiments, the conjugate or ligand described herein can be attached to an iRNA oligonucleotide with various linkers that can be cleavable or non-cleavable.

[0615] The term “linker” or “linking group” means an organic moiety that connects two parts of a compound, e.g., covalently attaches two parts of a compound. Linkers typically comprise a direct bond or an atom such as oxygen or sulfur, a unit such as NR8, C(O), C(O)NH, SO, SO₂, SO₂NH or a chain of atoms, such as, but not limited to, substituted or unsubstituted alkyl, substituted or unsubstituted alkenyl, substituted or unsubstituted alkynyl, arylalkyl, arylalkenyl, arylalkynyl, heteroarylalkyl, heteroarylalkenyl, heteroarylalkynyl, heterocyclylalkyl, heterocyclylalkenyl, heterocyclylalkynyl, aryl, heteroaryl, heterocyclyl, cycloalkyl, cycloalkenyl, alkylarylalkyl, alkylarylalkenyl, alkylarylalkynyl, alkenylarylalkyl, alkenylarylalkenyl, alkenylarylalkynyl, alkynylarylalkyl, alkynylarylalkenyl, alkynylarylalkynyl, alkylheteroarylalkyl, alkylheteroarylalkenyl, alkylheteroarylalkynyl, alkenylheteroarylalkyl, alkenylheteroarylalkenyl, alkenylheteroarylalkynyl, alkynylheteroarylalkyl, alkynylheteroarylalkenyl, alkynylheteroarylalkynyl, alkylheterocyclylalkyl, alkylheterocyclylalkenyl, alkylhererocyclylalkynyl, alkenylheterocyclylalkyl, alkenylheterocyclylalkenyl, alkenylheterocyclylalkynyl, alkynylheterocyclylalkyl, alkynylheterocyclylalkenyl, alkynylheterocyclylalkynyl, alkylaryl, alkenylaryl, alkynylaryl, alkylheteroaryl, alkenylheteroaryl, alkynylhereroaryl, which one or more methylenes can be interrupted or terminated by O, S, S(O), SO₂, N(R8), C(O), substituted or unsubstituted aryl, substituted or unsubstituted heteroaryl, substituted or unsubstituted heterocyclic; where R8 is hydrogen, acyl, aliphatic or substituted aliphatic. In certain embodiments, the linker is between about 1-24 atoms, 2-24, 3-24, 4-24, 5-24, 6-24, 6-18, 7-18, 8-18 atoms, 7-17, 8-17, 6-16, 7-16, or 8-16 atoms.

[0616] A cleavable linking group is one which is sufficiently stable outside the cell, but which upon entry into a target cell is cleaved to release the two parts the linker is holding together. In another embodiment, the cleavable linking group is cleaved at least about 10 times, 20, times, 30 times, 40 times, 50 times, 60 times, 70 times, 80 times, 90 times or more, or at least about 100 times faster in a target cell or under a first reference condition (which can, e.g., be selected to mimic or represent intracellular conditions) than in the blood of a subject, or under a second reference condition (which can, e.g., be selected to mimic or represent conditions found in the blood or serum).

[0617] Cleavable linking groups are susceptible to cleavage agents, e.g., pH, redox potential or the presence of degradative molecules. Generally, cleavage agents are more prevalent or found at higher levels or activities inside cells than in serum or blood. Examples of such degradative agents include: redox agents which are selected for particular substrates or which have no substrate specificity, including, e.g., oxidative or reductive enzymes or reductive agents such as mercaptans, present in cells, that can degrade a redox cleavable linking group by reduction; esterases; endosomes or agents that can create an acidic environment, e.g., those that result in a pH of five or lower; enzymes that can hydrolyze or degrade an acid cleavable linking group by acting as a general acid, peptidases (which can be substrate specific), and phosphatases.

[0618] A cleavable linkage group, such as a disulfide bond can be susceptible to pH. The pH of human serum is 7.4, while the average intracellular pH is slightly lower, ranging from about 7.1-7.3. Endosomes have a more acidic pH, in the range of 5.5-6.0, and lysosomes have an even more acidic pH at around 5.0. Some linkers will have a cleavable linking group that is cleaved at a selected pH, thereby releasing a cationic lipid from the ligand inside the cell, or into the desired compartment of the cell.

[0619] A linker can include a cleavable linking group that is cleavable by a particular enzyme. The type of cleavable linking group incorporated into a linker can depend on the cell to be targeted. For example, a liver-targeting ligand can be linked to a cationic lipid through a linker that includes an ester group. Liver cells are rich in esterases, and therefore the linker will be cleaved more efficiently in liver cells than in cell types that are not esterase-rich. Other cell-types rich in esterases include cells of the lung, renal cortex, and testis.

[0620] Linkers that contain peptide bonds can be used when targeting cell types rich in peptidases, such as liver cells and synoviocytes.

[0621] In general, the suitability of a candidate cleavable linking group can be evaluated by testing the ability of a degradative agent (or condition) to cleave the candidate linking group. It will also be desirable to also test the candidate cleavable linking group for the ability to resist cleavage in the blood or when in contact with other non-target tissue. Thus, one can determine the relative susceptibility to cleavage between a first and a second condition, where the first is selected to be indicative of cleavage in a target cell and the second is selected to be indicative of cleavage in other tissues or biological fluids, e.g., blood or serum. The evaluations can be carried out in cell free systems, in cells, in cell culture, in organ or tissue culture, or in whole animals. It can be useful to make initial evaluations in cell-free or culture conditions and to confirm by further evaluations in whole animals. In certain embodiments, useful candidate compounds are cleaved at least about 2, 4, 10, 20, 30, 40, 50, 60, 70, 80, 90, or about 100 times faster in the cell (or under in vitro conditions selected to mimic intracellular conditions) as compared to blood or serum (or under in vitro conditions selected to mimic extracellular conditions).

[0622] i. Redox Cleavable Linking Groups

[0623] In certain embodiments, a cleavable linking group is a redox cleavable linking group that is cleaved upon reduction or oxidation. An example of reductively cleavable linking group is a disulphide linking group (—S—S—). To determine if a candidate cleavable linking group is a suitable “reductively cleavable linking group,” or for example is suitable for use with a particular iRNA moiety and particular targeting agent one can look to methods described herein. For example, a candidate can be evaluated by incubation with dithiothreitol (DTT), or other reducing agent using reagents know in the art, which mimic the rate of cleavage which would be observed in a cell, e.g., a target cell. The candidates can also be evaluated under conditions which are selected to mimic blood or serum conditions. In one, candidate compounds are cleaved by at most about 10% in the blood. In other embodiments, useful candidate compounds are degraded at least about 2, 4, 10, 20, 30, 40, 50, 60, 70, 80, 90, or about 100 times faster in the cell (or under in vitro conditions selected to mimic intracellular conditions) as compared to blood (or under in vitro conditions selected to mimic extracellular conditions). The rate of cleavage of candidate compounds can be determined using standard enzyme kinetics assays under conditions chosen to mimic intracellular media and compared to conditions chosen to mimic extracellular media.

[0624] ii. Phosphate-Based Cleavable Linking Groups

[0625] In certain embodiments, a cleavable linker comprises a phosphate-based cleavable linking group. A phosphate-based cleavable linking group is cleaved by agents that degrade or hydrolyze the phosphate group. An example of an agent that cleaves phosphate groups in cells are enzymes such as phosphatases in cells. Examples of phosphate-based linking groups are —O—P(O)(ORk)-O—, —O—P(S)(ORk)-O—, —O—P(S)(SRk)-O—, —S—P(O)(ORk)-O—, —O—P(O)(ORk)-S—, —S—P(O)(ORk)-S—, —O—P(S)(ORk)-S—, —S—P(S)(ORk)-O—, —O—P(O)(Rk)-O—, —O—P(S)(Rk)-O—, —S—P(O)(Rk)-O—, —S—P(S)(Rk)-O—, —S—P(O)(Rk)-S—, —O—P(S)(Rk)-S—, wherein Rk at each occurrence can be, independently, C1-C20 alkyl, C1-C20 haloalkyl, C6-C10 aryl, or C7-C12 aralkyl. Exemplary embodiments include —O—P(O)(OH)—O—, —O—P(S)(OH)—O—, —O—P(S)(SH)—O—, —S—P(O)(OH)—O—, —O—P(O)(OH)—S—, —S—P(O)(OH)—S—, —O—P(S)(OH)—S—, —S—P(S)(OH)—O—, —O—P(O)(H)—O—, —O—P(S)(H)—O—, —S—P(O)(H)—O, —S—P(S)(H)—O—, —S—P(O)(H)—S—, and —O—P(S)(H)—S—. In certain embodiments a phosphate-based linking group is —O—P(O)(OH)—O—. These candidates can be evaluated using methods analogous to those described above.

[0626] iii. Acid Cleavable Linking Groups

[0627] In certain embodiments, a cleavable linker comprises an acid cleavable linking group. An acid cleavable linking group is a linking group that is cleaved under acidic conditions. In other embodiments acid cleavable linking groups are cleaved in an acidic environment with a pH of about 6.5 or lower (e.g., about 6.0, 5.75, 5.5, 5.25, 5.0, or lower), or by agents such as enzymes that can act as a general acid. In a cell, specific low pH organelles, such as endosomes and lysosomes can provide a cleaving environment for acid cleavable linking groups. Examples of acid cleavable linking groups include but are not limited to hydrazones, esters, and esters of amino acids. Acid cleavable groups can have the general formula —C═NN—, C(O)O, or —OC(O). An exemplary embodiment is when the carbon attached to the oxygen of the ester (the alkoxy group) is an aryl group, substituted alkyl group, or tertiary alkyl group such as dimethyl pentyl or t-butyl. These candidates can be evaluated using methods analogous to those described above.

[0628] iv. Ester-Based Cleavable Linking Groups

[0629] In certain embodiments, a cleavable linker comprises an ester-based cleavable linking group. An ester-based cleavable linking group is cleaved by enzymes such as esterases and amidases in cells. Examples of ester-based cleavable linking groups include but are not limited to esters of alkylene, alkenylene and alkynylene groups. Ester cleavable linking groups have the general formula —C(O)O—, or —OC(O)—. These candidates can be evaluated using methods analogous to those described above.

[0630] v. Peptide-Based Cleavable Linking Groups

[0631] In yet another embodiment, a cleavable linker comprises a peptide-based cleavable linking group. A peptide-based cleavable linking group is cleaved by enzymes such as peptidases and proteases in cells. Peptide-based cleavable linking groups are peptide bonds formed between amino acids to yield oligopeptides (e.g., dipeptides, tripeptides etc.) and polypeptides. Peptide-based cleavable groups do not include the amide group (—C(O)NH—). The amide group can be formed between any alkylene, alkenylene or alkynelene. A peptide bond is a special type of amide bond formed between amino acids to yield peptides and proteins. The peptide based cleavage group is generally limited to the peptide bond (i.e., the amide bond) formed between amino acids yielding peptides and proteins and does not include the entire amide functional group. Peptide-based cleavable linking groups have the general formula —NHCHR^{A}C(O)NHCHR^{B}C(O)—, where R^{A} and R^{B} are the R groups of the two adjacent amino acids. These candidates can be evaluated using methods analogous to those described above.

[0632] In some embodiments, an iRNA of the invention is conjugated to a carbohydrate through a linker. Non-limiting examples of iRNA carbohydrate conjugates with linkers of the compositions and methods of the invention include, but are not limited to,

[chemical structure]

[chemical structure]

[chemical structure]

[0633] when one of X or Y is an oligonucleotide, the other is a hydrogen.

[0634] In certain embodiments of the compositions and methods of the invention, a ligand is one or more “GalNAc” (N-acetylgalactosamine) derivatives attached through a bivalent or trivalent branched linker.

[0635] In certain embodiments, a dsRNA of the invention is conjugated to a bivalent or trivalent branched linker selected from the group of structures shown in any of formula (XLV)-(XLVI):

[chemical structure]

[0636] wherein:
[0637] q2A, q2B, q3A, q3B, q4A, q4B, q5A, q5B and q5C represent independently for each occurrence 0-20 and wherein the repeating unit can be the same or different;
[0638] P^{2A}, P^{2B} P^{3A}, P^{3B}, P^{4A}, P^{4B}, P^{5A}, P^{5B}, P^{5C}, T^{2A}, T^{2B}, T^{3A}, T^{3B}, T^{4A}, T^{4B}, T^{4A}, T^{5B}, T^{5C} are each independently for each occurrence absent, CO, NH, O, S, OC(O), NHC(O), CH₂, CH₂NH or CH₂O;
[0639] Q^{2A}, Q^{2B}, Q^{3A}, Q^{3B}, Q^{4A}, Q^{4B}, Q^{5A}, Q^{5B}, Q^{5C} are independently for each occurrence absent, alkylene, substituted alkylene wherein one or more methylenes can be interrupted or terminated by one or more of O, S, S(O), SO₂, N(R^{N}), C(R′)═C(R″), C≡C or C(O);
[0640] R^{2A}, R^{2B}, R^{3A}, R^{3A}, R^{4A}, R^{4B}, R^{5A}, R^{5B}, R^{5C} are each independently for each occurrence absent, NH, O, S, CH₂, C(O)O, C(O)NH, NHCH(R^{a})C(O), —C(O)—CH(R^{a})—NH—, CO, CH═N—O,

[chemical structure]

or heterocyclyl;
[0641] L^{2A}, L^{2B}, L^{3A}, L^{3B}, L^{4A}, L^{4B} L^{5A}, L^{5B} and L^{5C} represent the ligand; i.e. each independently for each occurrence a monosaccharide (such as GalNAc), disaccharide, trisaccharide, tetrasaccharide, oligosaccharide, or polysaccharide; and R^{a} is H or amino acid side chain. Trivalent conjugating GalNAc derivatives are particularly useful for use with RNAi agents for inhibiting the expression of a target gene, such as those of formula (XLIX):

[chemical structure]

[0642] wherein L^{5A}, L^{5B} and L^{5C} represent a monosaccharide, such as GalNAc derivative.

[0643] Examples of suitable bivalent and trivalent branched linker groups conjugating GalNAc derivatives include, but are not limited to, the structures recited above as formulas II, VII, XI, X, and XIII.

[0644] Representative U.S. patents that teach the preparation of RNA conjugates include, but are not limited to, U.S. Pat. Nos. 4,828,979; 4,948,882; 5,218,105; 5,525,465; 5,541,313; 5,545,730; 5,552,538; 5,578,717, 5,580,731; 5,591,584; 5,109,124; 5,118,802; 5,138,045; 5,414,077; 5,486,603; 5,512,439; 5,578,718; 5,608,046; 4,587,044; 4,605,735; 4,667,025; 4,762,779; 4,789,737; 4,824,941; 4,835,263; 4,876,335; 4,904,582; 4,958,013; 5,082,830; 5,112,963; 5,214,136; 5,082,830; 5,112,963; 5,214,136; 5,245,022; 5,254,469; 5,258,506; 5,262,536; 5,272,250; 5,292,873; 5,317,098; 5,371,241, 5,391,723; 5,416,203, 5,451,463; 5,510,475; 5,512,667; 5,514,785; 5,565,552; 5,567,810; 5,574,142; 5,585,481; 5,587,371; 5,595,726; 5,597,696; 5,599,923; 5,599,928; 5,688,941; 6,294,664; 6,320,017; 6,576,752; 6,783,931; 6,900,297; 7,037,646; and 8,106,022, the entire contents of each of which are hereby incorporated herein by reference.

[0645] It is not necessary for all positions in a given compound to be uniformly modified, and in fact more than one of the aforementioned modifications can be incorporated in a single compound or even at a single nucleoside within an iRNA. The present invention also includes iRNA compounds that are chimeric compounds.

[0646] “Chimeric” iRNA compounds or “chimeras,” in the context of this invention, are iRNA compounds, such as dsRNA agents, that contain two or more chemically distinct regions, each made up of at least one monomer unit, i.e., a nucleotide in the case of a dsRNA compound. These iRNAs typically contain at least one region wherein the RNA is modified so as to confer upon the iRNA increased resistance to nuclease degradation, increased cellular uptake, or increased binding affinity for the target nucleic acid. An additional region of the iRNA can serve as a substrate for enzymes capable of cleaving RNA:DNA or RNA:RNA hybrids. By way of example, RNase H is a cellular endonuclease which cleaves the RNA strand of an RNA:DNA duplex. Activation of RNase H, therefore, results in cleavage of the RNA target, thereby greatly enhancing the efficiency of iRNA inhibition of gene expression. Consequently, comparable results can often be obtained with shorter iRNAs when chimeric dsRNAs are used, compared to phosphorothioate deoxy dsRNAs hybridizing to the same target region. Cleavage of the RNA target can be routinely detected by gel electrophoresis and, if necessary, associated nucleic acid hybridization techniques known in the art.

[0647] In certain instances, the RNA of an iRNA can be modified by a non-ligand group. A number of non-ligand molecules have been conjugated to iRNAs in order to enhance the activity, cellular distribution or cellular uptake of the iRNA, and procedures for performing such conjugations are available in the scientific literature. Such non-ligand moieties have included lipid moieties, such as cholesterol (Kubo, T. et al., Biochem. Biophys. Res. Comm., 2007, 365(1):54-61; Letsinger et al., Proc. Natl. Acad. Sci. USA, 1989, 86:6553), cholic acid (Manoharan et al., Bioorg. Med. Chem. Lett., 1994, 4:1053), a thioether, e.g., hexyl-S-tritylthiol (Manoharan et al., Ann. N.Y. Acad. Sci., 1992, 660:306; Manoharan et al., Bioorg. Med. Chem. Let., 1993, 3:2765), a thiocholesterol (Oberhauser et al., Nucl. Acids Res., 1992, 20:533), an aliphatic chain, e.g., dodecandiol or undecyl residues (Saison-Behmoaras et al., EMBO J., 1991, 10:111; Kabanov et al., FEBS Lett., 1990, 259:327; Svinarchuk et al., Biochimie, 1993, 75:49), a phospholipid, e.g., di-hexadecyl-rac-glycerol or triethylammonium 1,2-di-O-hexadecyl-rac-glycero-3-H-phosphonate (Manoharan et al., Tetrahedron Lett., 1995, 36:3651; Shea et al., Nucl. Acids Res., 1990, 18:3777), a polyamine or a polyethylene glycol chain (Manoharan et al., Nucleosides & Nucleotides, 1995, 14:969), or adamantane acetic acid (Manoharan et al., Tetrahedron Lett., 1995, 36:3651), a palmityl moiety (Mishra et al., Biochim. Biophys. Acta, 1995, 1264:229), or an octadecylamine or hexylamino-carbonyl-oxycholesterol moiety (Crooke et al., J. Pharmacol. Exp. Ther., 1996, 277:923). Representative United States patents that teach the preparation of such RNA conjugates have been listed above. Typical conjugation protocols involve the synthesis of RNAs bearing an aminolinker at one or more positions of the sequence. The amino group is then reacted with the molecule being conjugated using appropriate coupling or activating reagents. The conjugation reaction can be performed either with the RNA still bound to the solid support or following cleavage of the RNA, in solution phase. Purification of the RNA conjugate by HPLC typically affords the pure conjugate.

### V. In Vivo Testing of GSK3A Knockdown

[0648] Animal models of GSK3α-associated neurodegenerative disease, e.g., fragile X syndrome (FXS), have been generated and can further be used to demonstrate the in vivo efficacy of the RNAi agents provided herein.

[0649] The most common animal models used to study FXS include mouse models (Bakker C. E., et al. 1994, Cell 78, 23-33) and Drosophila models (Wan L., et al. 2000, Mol. Cell. Biol. 20, 8536-854710; Zhang et al., 2001, Cell 107, 591-603). The first mouse model was developed by generating mice with an inactive Fmr1 gene (FX mice). With these and other FMRP knockout mice, FX mice have been shown to display characteristics with some similarities to patients with FXS, including macroorchidism, certain features of behavior, and some cognitive impairments. FX mice also exhibit increased dendritic spine length and number, but reduced maturation of spines, compared to wild-type littermates. The Drosophila models to study FXS was also developed. dfinr1 was identified as the invertebrate family member of the FMR1/FXR gene family. Over-expression of RNA binding-deficient mutant dfinr1 in Drosophila caused wing deformities, including loss of anterior cross-veins longitudinal veins, and severe rough eye, suggesting altered cell fate determination and proliferation, and increased apoptosis. Drosophila FXS models lacking expression of dFMRP or over-expressing a loss-of-function dFMRP mutant were also characterized (Zhang et al., 2001, Cell 107, 591-603). Over-expression of loss-of-function mutant dFMRP produced an abnormal wing span or up-held wings, impaired coordination, caused early death, and dFMRP-null flies displayed exaggerated synaptic outgrowth. Knockout and mutation of dfinr also affected neurotransmission and increased peripheral synaptic transmission while decreasing central synaptic transmission.

[0650] Both the mouse and fly models of FXS can be used to demonstrate the in vivo efficacy of the RNAi agents provided herein.

### VI. Delivery of an RNAi Agent of the Disclosure

[0651] The delivery of a RNAi agent of the disclosure to a cell e.g., a cell within a subject, such as a human subject (e.g., a subject in need thereof, such as a subject having a GSK3α-associated neurodegenerative disorder, e.g., fragile X syndrome (FXS), can be achieved in a number of different ways. For example, delivery may be performed by contacting a cell with an RNAi agent of the disclosure either in vitro or in vivo. In vivo delivery may also be performed directly by administering a composition comprising an RNAi agent, e.g., a dsRNA, to a subject. Alternatively, in vivo delivery may be performed indirectly by administering one or more vectors that encode and direct the expression of the RNAi agent. These alternatives are discussed further below.

[0652] In general, any method of delivering a nucleic acid molecule (in vitro or in vivo) can be adapted for use with a RNAi agent of the disclosure (see e.g., Akhtar S. and Julian R L., (1992) Trends Cell. Biol. 2(5):139-144 and WO94/02595, which are incorporated herein by reference in their entireties). For in vivo delivery, factors to consider in order to deliver an RNAi agent include, for example, biological stability of the delivered agent, prevention of non-specific effects, and accumulation of the delivered agent in the target tissue. The non-specific effects of an RNAi agent can be minimized by local administration, for example, by direct injection or implantation into a tissue or topically administering the preparation. Local administration to a treatment site maximizes local concentration of the agent, limits the exposure of the agent to systemic tissues that can otherwise be harmed by the agent or that can degrade the agent, and permits a lower total dose of the RNAi agent to be administered. Several studies have shown successful knockdown of gene products when an RNAi agent is administered locally. For example, intraocular delivery of a VEGF dsRNA by intravitreal injection in cynomolgus monkeys (Tolentino, M J. et al., (2004) Retina 24:132-138) and subretinal injections in mice (Reich, S J. et al. (2003) Mol. Vis. 9:210-216) were both shown to prevent neovascularization in an experimental model of age-related macular degeneration. In addition, direct intratumoral injection of a dsRNA in mice reduces tumor volume (Pille, J. et al. (2005) Mol. Ther. 11:267-274) and can prolong survival of tumor-bearing mice (Kim, W J. et al., (2006) Mol. Ther. 14:343-350; Li, S. et al., (2007) Mol. Ther. 15:515-523). RNA interference has also shown success with local delivery to the CNS by direct injection (Dorn, G. et al., (2004) Nucleic Acids 32:e49; Tan, P H. et al. (2005) Gene Ther. 12:59-66; Makimura, H. et al. (2002) BMC Neurosci. 3:18; Shishkina, G T., et al. (2004) Neuroscience 129:521-528; Thakker, E R., et al. (2004) Proc. Natl. Acad. Sci. U.S.A. 101:17270-17275; Akaneya, Y., et al. (2005) J. Neurophysiol. 93:594-602) and to the lungs by intranasal administration (Howard, K A. et al., (2006) Mol. Ther. 14:476-484; Zhang, X. et al., (2004) J. Biol. Chem. 279:10677-10684; Bitko, V. et al., (2005) Nat. Med. 11:50-55). For administering a RNAi agent systemically for the treatment of a disease, the RNA can be modified or alternatively delivered using a drug delivery system; both methods act to prevent the rapid degradation of the dsRNA by endo- and exo-nucleases in vivo. Modification of the RNA or the pharmaceutical carrier can also permit targeting of the RNAi agent to the target tissue and avoid undesirable off-target effects (e.g., without wishing to be bound by theory, use of GNAs as described herein has been identified to destabilize the seed region of a dsRNA, resulting in enhanced preference of such dsRNAs for on-target effectiveness, relative to off-target effects, as such off-target effects are significantly weakened by such seed region destabilization). RNAi agents can be modified by chemical conjugation to lipophilic groups such as cholesterol to enhance cellular uptake and prevent degradation. For example, a RNAi agent directed against ApoB conjugated to a lipophilic cholesterol moiety was injected systemically into mice and resulted in knockdown of apoB mRNA in both the liver and jejunum (Soutschek, J. et al., (2004) Nature 432:173-178). Conjugation of an RNAi agent to an aptamer has been shown to inhibit tumor growth and mediate tumor regression in a mouse model of prostate cancer (McNamara, J O. et al., (2006) Nat. Biotechnol. 24:1005-1015). In an alternative embodiment, the RNAi agent can be delivered using drug delivery systems such as a nanoparticle, a dendrimer, a polymer, liposomes, or a cationic delivery system. Positively charged cationic delivery systems facilitate binding of molecule RNAi agent (negatively charged) and also enhance interactions at the negatively charged cell membrane to permit efficient uptake of an RNAi agent by the cell. Cationic lipids, dendrimers, or polymers can either be bound to an RNAi agent, or induced to form a vesicle or micelle (see e.g., Kim SH. et al., (2008) Journal of Controlled Release 129(2):107-116) that encases an RNAi agent. The formation of vesicles or micelles further prevents degradation of the RNAi agent when administered systemically. Methods for making and administering cationic-RNAi agent complexes are well within the abilities of one skilled in the art (see e.g., Sorensen, D R., et al. (2003) J. Mol. Biol 327:761-766; Verma, U N. et al., (2003) Clin. Cancer Res. 9:1291-1300; Arnold, A S et al. (2007) J. Hypertens. 25:197-205, which are incorporated herein by reference in their entirety). Some non-limiting examples of drug delivery systems useful for systemic delivery of RNAi agents include DOTAP (Sorensen, D R., et al (2003), supra; Verma, U N. et al., (2003), supra), Oligofectamine, “solid nucleic acid lipid particles” (Zimmermann, T S. et al., (2006) Nature 441:111-114), cardiolipin (Chien, P Y. et al., (2005) Cancer Gene Ther. 12:321-328; Pal, A. et al., (2005) Int J. Oncol. 26:1087-1091), polyethyleneimine (Bonnet M E. et al., (2008) Pharm. Res. August 16 Epub ahead of print; Aigner, A. (2006) J. Biomed. Biotechnol. 71659), Arg-Gly-Asp (RGD) peptides (Liu, S. (2006) Mol. Pharm. 3:472-487), and polyamidoamines (Tomalia, D A. et al., (2007) Biochem. Soc. Trans. 35:61-67; Yoo, H. et al., (1999) Pharm. Res. 16:1799-1804). In some embodiments, a RNAi agent forms a complex with cyclodextrin for systemic administration. Methods for administration and pharmaceutical compositions of RNAi agents and cyclodextrins can be found in U.S. Pat. No. 7,427,605, which is herein incorporated by reference in its entirety.

[0653] Certain aspects of the instant disclosure relate to a method of reducing the expression of a GSK3α target gene in a cell, comprising contacting said cell with the double-stranded RNAi agent of the disclosure. In one embodiment, the cell is a hepatic cell, optionally a hepatocyte. In one embodiment, the cell is an extrahepatic cell, optionally a CNS cell.

[0654] Another aspect of the disclosure relates to a method of reducing the expression of a GSK3α target gene in a subject, comprising administering to the subject the double-stranded RNAi agent of the disclosure.

[0655] Another aspect of the disclosure relates to a method of treating a subject having a GSK3α-associated neurodegenerative disorder, comprising administering to the subject a therapeutically effective amount of the double-stranded RNAi agent of the disclosure, thereby treating the subject.

[0656] Exemplary CNS disorders that can be treated by the method of the disclosure include fragile X syndrome (FXS).

[0657] In one embodiment, the double-stranded RNAi agent is administered subcutaneously.

[0658] In one embodiment, the double-stranded RNAi agent is administered by intraventricular administration.

[0659] In one embodiment, the double-stranded RNAi agent is administered intrathecally. In one embodiment, the double-stranded RNAi agent is administered intracerebroventricularly. By intrathecal or intracerebroventricular administration of the double-stranded RNAi agent, the method can reduce the expression of a GSK3α target gene in a brain (e.g., striatum) or spine tissue, for instance, cortex, cerebellum, cervical spine, lumbar spine, and thoracic spine.

[0660] For ease of exposition the formulations, compositions and methods in this section are discussed largely with regard to modified siRNA compounds. It may be understood, however, that these formulations, compositions and methods can be practiced with other siRNA compounds, e.g., unmodified siRNA compounds, and such practice is within the disclosure. A composition that includes a RNAi agent can be delivered to a subject by a variety of routes. Exemplary routes include intrathecal, subcutaneous, intravenous, intraventricular (also known as intracerebroventricular), intraperitoneal, intravitreal, topical, rectal, anal, vaginal, and ocular.

[0661] The RNAi agents of the disclosure can be incorporated into pharmaceutical compositions suitable for administration. Such compositions typically include one or more species of RNAi agent and a pharmaceutically acceptable carrier. As used herein the language “pharmaceutically acceptable carrier” is intended to include any and all solvents, dispersion media, coatings, antibacterial and antifungal agents, isotonic and absorption delaying agents, and the like, compatible with pharmaceutical administration. The use of such media and agents for pharmaceutically active substances is well known in the art. Except insofar as any conventional media or agent is incompatible with the active compound, use thereof in the compositions is contemplated. Supplementary active compounds can also be incorporated into the compositions.

[0662] The pharmaceutical compositions of the present disclosure may be administered in a number of ways depending upon whether local or systemic treatment is desired and upon the area to be treated. Administration may be topical (including ophthalmic, vaginal, rectal, transdermal), oral, or parenteral. Parenteral administration includes intravenous drip, subcutaneous, intraperitoneal, or intramuscular injection, or intrathecal or intraventricular administration.

[0663] The route and site of administration may be chosen to enhance targeting. For example, to target muscle cells, intramuscular injection into the muscles of interest would be a logical choice. Lung cells might be targeted by administering the RNAi agent in powder or aerosol form. The vascular endothelial cells could be targeted by coating a balloon catheter with the RNAi agent and mechanically introducing the RNA.

[0664] Formulations for topical administration may include transdermal patches, ointments, lotions, creams, gels, drops, suppositories, sprays, liquids, and powders. Conventional pharmaceutical carriers, aqueous, powder or oily bases, thickeners and the like may be necessary or desirable. Coated condoms, gloves, and the like may also be useful.

[0665] Compositions for oral administration include powders or granules, suspensions or solutions in water, syrups, elixirs or non-aqueous media, tablets, capsules, lozenges, or troches. In the case of tablets, carriers that can be used include lactose, sodium citrate and salts of phosphoric acid. Various disintegrants such as starch, and lubricating agents such as magnesium stearate, sodium lauryl sulfate and talc, are commonly used in tablets. For oral administration in capsule form, useful diluents are lactose and high molecular weight polyethylene glycols. When aqueous suspensions are required for oral use, the nucleic acid compositions can be combined with emulsifying and suspending agents. If desired, certain sweetening or flavoring agents can be added.

[0666] Compositions for intrathecal or intraventricular administration may include sterile aqueous solutions which may also contain buffers, diluents, and other suitable additives.

[0667] Formulations for parenteral administration may include sterile aqueous solutions which may also contain buffers, diluents, and other suitable additives. Intraventricular injection may be facilitated by an intraventricular catheter, for example, attached to a reservoir. For intravenous use, the total concentration of solutes may be controlled to render the preparation isotonic.

[0668] In one embodiment, the administration of the siRNA compound, e.g., a double-stranded siRNA compound, or ssiRNA compound, composition is parenteral, e.g., intravenous (e.g., as a bolus or as a diffusible infusion), intradermal, intraperitoneal, intramuscular, intrathecal, intraventricular, intracranial, subcutaneous, transmucosal, buccal, sublingual, endoscopic, rectal, oral, vaginal, topical, urethral, or ocular. Administration can be provided by the subject or by another person, e.g., a health care provider. The medication can be provided in measured doses or in a dispenser which delivers a metered dose. Selected modes of delivery are discussed in more detail below.

[0669] Intrathecal Administration.

[0670] In one embodiment, the double-stranded RNAi agent is delivered by intrathecal injection (i.e., injection into the spinal fluid which bathes the brain and spinal cord tissue). Intrathecal injection of RNAi agents into the spinal fluid can be performed as a bolus injection or via minipumps which can be implanted beneath the skin, providing a regular and constant delivery of siRNA into the spinal fluid. The circulation of the spinal fluid from the choroid plexus, where it is produced, down around the spinal cord and dorsal root ganglia and subsequently up past the cerebellum and over the cortex to the arachnoid granulations, where the fluid can exit the CNS, that, depending upon size, stability, and solubility of the compounds injected, molecules delivered intrathecally could hit targets throughout the entire CNS.

[0671] In some embodiments, the intrathecal administration is via a pump. The pump may be a surgically implanted osmotic pump. In one embodiment, the osmotic pump is implanted into the subarachnoid space of the spinal canal to facilitate intrathecal administration.

[0672] In some embodiments, the intrathecal administration is via an intrathecal delivery system for a pharmaceutical including a reservoir containing a volume of the pharmaceutical agent, and a pump configured to deliver a portion of the pharmaceutical agent contained in the reservoir. More details about this intrathecal delivery system may be found in WO 2015/116658, which is incorporated by reference in its entirety.

[0673] The amount of intrathecally injected RNAi agents may vary from one target gene to another target gene and the appropriate amount that has to be applied may have to be determined individually for each target gene. Typically, this amount ranges from 10 μg to 2 mg, or 50 μg to 1500 μg, or 100 μg to 1000 μg.

[0674] Vector Encoded RNAi Agents of the Disclosure RNAi agents targeting the GSK3α gene can be expressed from transcription units inserted into DNA or RNA vectors (see, e.g., Couture, A, et al., TIG. (1996), 12:5-10; WO 00/22113, WO 00/22114, and U.S. Pat. No. 6,054,299). Expression can be sustained (months or longer), depending upon the specific construct used and the target tissue or cell type. These transgenes can be introduced as a linear construct, a circular plasmid, or a viral vector, which can be an integrating or non-integrating vector. The transgene can also be constructed to permit it to be inherited as an extrachromosomal plasmid (Gassmann, et al., (1995) Proc. Natl. Acad. Sci. USA 92:1292).

[0675] The individual strand or strands of a RNAi agent can be transcribed from a promoter on an expression vector. Where two separate strands are to be expressed to generate, for example, a dsRNA, two separate expression vectors can be co-introduced (e.g., by transfection or infection) into a target cell. Alternatively, each individual strand of a dsRNA can be transcribed by promoters both of which are located on the same expression plasmid. In one embodiment, a dsRNA is expressed as inverted repeat polynucleotides joined by a linker polynucleotide sequence such that the dsRNA has a stem and loop structure.

[0676] RNAi agent expression vectors are generally DNA plasmids or viral vectors. Expression vectors compatible with eukaryotic cells, such as those compatible with vertebrate cells, can be used to produce recombinant constructs for the expression of a RNAi agent as described herein. Delivery of RNAi agent expressing vectors can be systemic, such as by intravenous or intramuscular administration, by administration to target cells ex-planted from the patient followed by reintroduction into the patient, or by any other means that allows for introduction into a desired target cell.

[0677] Viral vector systems which can be utilized with the methods and compositions described herein include, but are not limited to, (a) adenovirus vectors; (b) retrovirus vectors, including but not limited to lentiviral vectors, moloney murine leukemia virus, etc.; (c) adeno-associated virus vectors; (d) herpes simplex virus vectors; (e) SV 40 vectors; (f) polyoma virus vectors; (g) papilloma virus vectors; (h) picornavirus vectors; (i) pox virus vectors such as an orthopox, e.g., vaccinia virus vectors or avipox, e.g. canary pox or fowl pox; and (j) a helper-dependent or gutless adenovirus. Replication-defective viruses can also be advantageous. Different vectors will or will not become incorporated into the cells' genome. The constructs can include viral sequences for transfection, if desired. Alternatively, the construct can be incorporated into vectors capable of episomal replication, e.g. EPV and EBV vectors. Constructs for the recombinant expression of a RNAi agent will generally require regulatory elements, e.g., promoters, enhancers, etc., to ensure the expression of the RNAi agent in target cells. Other aspects to consider for vectors and constructs are known in the art.

### VII. Pharmaceutical Compositions of the Invention

[0678] The present disclosure also includes pharmaceutical compositions and formulations which include the RNAi agents of the disclosure. In one embodiment, provided herein are pharmaceutical compositions containing an RNAi agent, as described herein, and a pharmaceutically acceptable carrier. The pharmaceutical compositions containing the RNAi agent are useful for treating a disease or disorder associated with the expression or activity of GSK3α, e.g., a GSK3α-associated neurodegenerative disease, such as fragile X syndrome (FXS).

[0679] Such pharmaceutical compositions are formulated based on the mode of delivery. One example is compositions that are formulated for systemic administration via parenteral delivery, e.g., by intravenous (IV), intramuscular (IM), or for subcutaneous (subQ) delivery. Another example is compositions that are formulated for direct delivery into the CNS, e.g., by intrathecal or intraventricular routes of injection, optionally by infusion into the brain (e.g., striatum), such as by continuous pump infusion.

[0680] In some embodiments, the pharmaceutical compositions of the invention are pyrogen free or non-pyrogenic.

[0681] The pharmaceutical compositions of the disclosure may be administered in dosages sufficient to inhibit expression of a GSK3α gene. In general, a suitable dose of an RNAi agent of the disclosure will be a flat dose in the range of about 0.001 to about 200.0 mg about once per month to about once per year, typically about once per quarter (i.e., about once every three months) to about once per year, generally a flat dose in the range of about 1 to 50 mg about once per month to about once per year, typically about once per quarter to about once per year.

[0682] After an initial treatment regimen (e.g., loading dose), the treatments can be administered on a less frequent basis.

[0683] The skilled artisan will appreciate that certain factors can influence the dosage and timing required to effectively treat a subject, including but not limited to the severity of the disease or disorder, previous treatments, the general health or age of the subject, and other diseases present. Moreover, treatment of a subject with a therapeutically effective amount of a composition can include a single treatment or a series of treatments.

[0684] Advances in mouse genetics have generated a number of mouse models for the study of various GSK3α-associated neurodegenerative diseases that would benefit from reduction in the expression of GSK3α. Such models can be used for in vivo testing of RNAi agents, as well as for determining a therapeutically effective dose. Suitable mouse models are known in the art and include, for example, the mouse models described elsewhere herein.

[0685] The pharmaceutical compositions of the present disclosure can be administered in a number of ways depending upon whether local or systemic treatment is desired and upon the area to be treated. Administration can be topical (e.g., by a transdermal patch), epidermal and transdermal, oral or parenteral. Parenteral administration includes intravenous, intraarterial, subcutaneous, intraperitoneal or intramuscular injection or infusion; subdermal, e.g., via an implanted device; or intracranial, e.g., by intraparenchymal, intrathecal or intraventricular, administration.

[0686] The RNAi agents can be delivered in a manner to target a particular tissue, such as the liver, the CNS (e.g., neuronal, glial or vascular tissue of the brain), or both the liver and CNS.

[0687] Pharmaceutical compositions and formulations for topical administration can include transdermal patches, ointments, lotions, creams, gels, drops, suppositories, sprays, liquids and powders. Conventional pharmaceutical carriers, aqueous, powder or oily bases, thickeners and the like can be necessary or desirable. Coated condoms, gloves and the like can also be useful. Suitable topical formulations include those in which the RNAi agents featured in the disclosure are in admixture with a topical delivery agent such as lipids, liposomes, fatty acids, fatty acid esters, steroids, chelating agents and surfactants. Suitable lipids and liposomes include neutral (e.g., dioleoylphosphatidyl DOPE ethanolamine, dimyristoylphosphatidyl choline DMPC, distearolyphosphatidyl choline) negative (e.g., dimyristoylphosphatidyl glycerol DMPG) and cationic (e.g., dioleoyltetramethylaminopropyl DOTAP and dioleoylphosphatidyl ethanolamine DOTMA). RNAi agents featured in the disclosure can be encapsulated within liposomes or can form complexes thereto, in particular to cationic liposomes. Alternatively, RNAi agents can be complexed to lipids, in particular to cationic lipids. Suitable fatty acids and esters include but are not limited to arachidonic acid, oleic acid, eicosanoic acid, lauric acid, caprylic acid, capric acid, myristic acid, palmitic acid, stearic acid, linoleic acid, linolenic acid, dicaprate, tricaprate, monoolein, dilaurin, glyceryl 1-monocaprate, 1-dodecylazacycloheptan−2-one, an acylcarnitine, an acylcholine, or a C₁₋₂₀ alkyl ester (e.g., isopropylmyristate IPM), monoglyceride, diglyceride or pharmaceutically acceptable salt thereof. Topical formulations are described in detail in U.S. Pat. No. 6,747,014, which is incorporated herein by reference.

[0688] A. RNAi Agent Formulations Comprising Membranous Molecular Assemblies

[0689] A RNAi agent for use in the compositions and methods of the disclosure can be formulated for delivery in a membranous molecular assembly, e.g., a liposome or a micelle. As used herein, the term “liposome” refers to a vesicle composed of amphiphilic lipids arranged in at least one bilayer, e.g., one bilayer or a plurality of bilayers. Liposomes include unilamellar and multilamellar vesicles that have a membrane formed from a lipophilic material and an aqueous interior. The aqueous portion contains the RNAi agent composition. The lipophilic material isolates the aqueous interior from an aqueous exterior, which typically does not include the RNAi agent composition, although in some examples, it may. Liposomes are useful for the transfer and delivery of active ingredients to the site of action. Because the liposomal membrane is structurally similar to biological membranes, when liposomes are applied to a tissue, the liposomal bilayer fuses with bilayer of the cellular membranes. As the merging of the liposome and cell progresses, the internal aqueous contents that include the RNAi agent are delivered into the cell where the RNAi agent can specifically bind to a target RNA and can mediate RNAi. In some cases the liposomes are also specifically targeted, e.g., to direct the RNAi agent to particular cell types.

[0690] A liposome containing an RNAi agent can be prepared by a variety of methods. In one example, the lipid component of a liposome is dissolved in a detergent so that micelles are formed with the lipid component. For example, the lipid component can be an amphipathic cationic lipid or lipid conjugate. The detergent can have a high critical micelle concentration and may be nonionic. Exemplary detergents include cholate, CHAPS, octylglucoside, deoxycholate, and lauroyl sarcosine. The RNAi agent preparation is then added to the micelles that include the lipid component. The cationic groups on the lipid interact with the RNAi agent and condense around the RNAi agent to form a liposome. After condensation, the detergent is removed, e.g., by dialysis, to yield a liposomal preparation of RNAi agent.

[0691] If necessary a carrier compound that assists in condensation can be added during the condensation reaction, e.g., by controlled addition. For example, the carrier compound can be a polymer other than a nucleic acid (e.g., spermine or spermidine). pH can also be adjusted to favor condensation.

[0692] Methods for producing stable polynucleotide delivery vehicles, which incorporate a polynucleotide/cationic lipid complex as structural components of the delivery vehicle, are further described in, e.g., WO 96/37194, the entire contents of which are incorporated herein by reference. Liposome formation can also include one or more aspects of exemplary methods described in Felgner, P. L. et al., (1987) Proc. Natl. Acad. Sci. USA 8:7413-7417; U.S. Pat. Nos. 4,897,355; 5,171,678; Bangham et al., (1965) M. Mol. Biol. 23:238; Olson et al., (1979) Biochim. Biophys. Acta 557:9; Szoka et al., (1978) Proc. Natl. Acad. Sci. 75: 4194; Mayhew et al., (1984) Biochim. Biophys. Acta 775:169; Kim et al., (1983) Biochim. Biophys. Acta 728:339; and Fukunaga et al., (1984) Endocrinol. 115:757. Commonly used techniques for preparing lipid aggregates of appropriate size for use as delivery vehicles include sonication and freeze-thaw plus extrusion (see, e.g., Mayer et al., (1986) Biochim. Biophys. Acta 858:161. Microfluidization can be used when consistently small (50 to 200 nm) and relatively uniform aggregates are desired (Mayhew et al., (1984) Biochim. Biophys. Acta 775:169. These methods are readily adapted to packaging RNAi agent preparations into liposomes.

[0693] Liposomes fall into two broad classes. Cationic liposomes are positively charged liposomes which interact with the negatively charged nucleic acid molecules to form a stable complex. The positively charged nucleic acid/liposome complex binds to the negatively charged cell surface and is internalized in an endosome. Due to the acidic pH within the endosome, the liposomes are ruptured, releasing their contents into the cell cytoplasm (Wang et al. (1987) Biochem. Biophys. Res. Commun., 147:980-985).

[0694] Liposomes, which are pH-sensitive or negatively charged, entrap nucleic acids rather than complex with them. Since both the nucleic acid and the lipid are similarly charged, repulsion rather than complex formation occurs. Nevertheless, some nucleic acid is entrapped within the aqueous interior of these liposomes. pH sensitive liposomes have been used to deliver nucleic acids encoding the thymidine kinase gene to cell monolayers in culture. Expression of the exogenous gene was detected in the target cells (Zhou et al. (1992) Journal of Controlled Release, 19:269-274).

[0695] One major type of liposomal composition includes phospholipids other than naturally-derived phosphatidylcholine. Neutral liposome compositions, for example, can be formed from dimyristoyl phosphatidylcholine (DMPC) or dipalmitoyl phosphatidylcholine (DPPC). Anionic liposome compositions generally are formed from dimyristoyl phosphatidylglycerol, while anionic fusogenic liposomes are formed primarily from dioleoyl phosphatidylethanolamine (DOPE). Another type of liposomal composition is formed from phosphatidylcholine (PC) such as, for example, soybean PC, and egg PC. Another type is formed from mixtures of phospholipid or phosphatidylcholine or cholesterol.

[0696] Examples of other methods to introduce liposomes into cells in vitro and in vivo include U.S. Pat. Nos. 5,283,185; 5,171,678; WO 94/00569; WO 93/24640; WO 91/16024; Felgner, (1994) J. Biol. Chem. 269:2550; Nabel, (1993) Proc. Natl. Acad. Sci. 90:11307; Nabel, (1992) Human Gene Ther. 3:649; Gershon, (1993) Biochem. 32:7143; and Strauss, (1992) EMBO J. 11:417.

[0697] Non-ionic liposomal systems have also been examined to determine their utility in the delivery of drugs to the skin, in particular systems comprising non-ionic surfactant and cholesterol. Non-ionic liposomal formulations comprising Novasome™ I (glyceryl dilaurate/cholesterol/polyoxyethylene-10-stearyl ether) and Novasome™ II (glyceryl distearate/cholesterol/polyoxyethylene-10-stearyl ether) were used to deliver cyclosporin-A into the dermis of mouse skin. Results indicated that such non-ionic liposomal systems were effective in facilitating the deposition of cyclosporine A into different layers of the skin (Hu et al., (1994) S.T.P. Pharma. Sci., 4(6):466).

[0698] Liposomes also include “sterically stabilized” liposomes, a term which, as used herein, refers to liposomes comprising one or more specialized lipids that, when incorporated into liposomes, result in enhanced circulation lifetimes relative to liposomes lacking such specialized lipids. Examples of sterically stabilized liposomes are those in which part of the vesicle-forming lipid portion of the liposome (A) comprises one or more glycolipids, such as monosialoganglioside G_{M1}, or (B) is derivatized with one or more hydrophilic polymers, such as a polyethylene glycol (PEG) moiety. While not wishing to be bound by any particular theory, it is thought in the art that, at least for sterically stabilized liposomes containing gangliosides, sphingomyelin, or PEG-derivatized lipids, the enhanced circulation half-life of these sterically stabilized liposomes derives from a reduced uptake into cells of the reticuloendothelial system (RES) (Allen et al., (1987) FEBS Letters, 223:42; Wu et al., (1993) Cancer Research, 53:3765).

[0699] Various liposomes comprising one or more glycolipids are known in the art. Papahadjopoulos et al. (Ann. N.Y. Acad. Sci., (1987), 507:64) reported the ability of monosialoganglioside G_{M1}, galactocerebroside sulfate and phosphatidylinositol to improve blood half-lives of liposomes. These findings were expounded upon by Gabizon et al. (Proc. Natl. Acad. Sci. U.S.A., (1988), 85:6949). U.S. Pat. No. 4,837,028 and WO 88/04924, both to Allen et al., disclose liposomes comprising (1) sphingomyelin and (2) the ganglioside G_{M1} or a galactocerebroside sulfate ester. U.S. Pat. No. 5,543,152 (Webb et al.) discloses liposomes comprising sphingomyelin. Liposomes comprising 1,2-sn-dimyristoylphosphatidylcholine are disclosed in WO 97/13499 (Lim et al).

[0700] In one embodiment, cationic liposomes are used. Cationic liposomes possess the advantage of being able to fuse to the cell membrane. Non-cationic liposomes, although not able to fuse as efficiently with the plasma membrane, are taken up by macrophages in vivo and can be used to deliver RNAi agents to macrophages.

[0701] Further advantages of liposomes include: liposomes obtained from natural phospholipids are biocompatible and biodegradable; liposomes can incorporate a wide range of water and lipid soluble drugs; liposomes can protect encapsulated RNAi agents in their internal compartments from metabolism and degradation (Rosoff, in “Pharmaceutical Dosage Forms,” Lieberman, Rieger and Banker (Eds.), 1988, volume 1, p. 245). Important considerations in the preparation of liposome formulations are the lipid surface charge, vesicle size and the aqueous volume of the liposomes.

[0702] A positively charged synthetic cationic lipid, N-[1-(2,3-dioleyloxy)propyl]-N,N,N-trimethylammonium chloride (DOTMA) can be used to form small liposomes that interact spontaneously with nucleic acid to form lipid-nucleic acid complexes which are capable of fusing with the negatively charged lipids of the cell membranes of tissue culture cells, resulting in delivery of RNAi agent (see, e.g., Felgner, P. L. et al., (1987) Proc. Natl. Acad. Sci. USA 8:7413-7417, and U.S. Pat. No. 4,897,355 for a description of DOTMA and its use with DNA).

[0703] A DOTMA analogue, 1,2-bis(oleoyloxy)-3-(trimethylammonia)propane (DOTAP) can be used in combination with a phospholipid to form DNA-complexing vesicles. Lipofectin™ Bethesda Research Laboratories, Gaithersburg, Md.) is an effective agent for the delivery of highly anionic nucleic acids into living tissue culture cells that comprise positively charged DOTMA liposomes which interact spontaneously with negatively charged polynucleotides to form complexes. When enough positively charged liposomes are used, the net charge on the resulting complexes is also positive. Positively charged complexes prepared in this way spontaneously attach to negatively charged cell surfaces, fuse with the plasma membrane, and efficiently deliver functional nucleic acids into, for example, tissue culture cells. Another commercially available cationic lipid, 1,2-bis(oleoyloxy)-3,3-(trimethylammonia)propane (“DOTAP”) (Boehringer Mannheim, Indianapolis, Indiana) differs from DOTMA in that the oleoyl moieties are linked by ester, rather than ether linkages.

[0704] Other reported cationic lipid compounds include those that have been conjugated to a variety of moieties including, for example, carboxyspermine which has been conjugated to one of two types of lipids and includes compounds such as 5-carboxyspermylglycine dioctaoleoylamide (“DOGS”) (Transfectam™, Promega, Madison, Wisconsin) and dipalmitoylphosphatidylethanolamine 5-carboxyspermyl-amide (“DPPES”) (see, e.g., U.S. Pat. No. 5,171,678).

[0705] Another cationic lipid conjugate includes derivatization of the lipid with cholesterol (“DC-Chol”) which has been formulated into liposomes in combination with DOPE (See, Gao, X. and Huang, L., (1991) Biochim. Biophys. Res. Commun. 179:280). Lipopolylysine, made by conjugating polylysine to DOPE, has been reported to be effective for transfection in the presence of serum (Zhou, X. et al., (1991) Biochim. Biophys. Acta 1065:8). For certain cell lines, these liposomes containing conjugated cationic lipids, are said to exhibit lower toxicity and provide more efficient transfection than the DOTMA-containing compositions. Other commercially available cationic lipid products include DMRIE and DMRIE-HP (Vical, La Jolla, California) and Lipofectamine (DOSPA) (Life Technology, Inc., Gaithersburg, Maryland). Other cationic lipids suitable for the delivery of oligonucleotides are described in WO 98/39359 and WO 96/37194.

[0706] Liposomal formulations are particularly suited for topical administration, liposomes present several advantages over other formulations. Such advantages include reduced side effects related to high systemic absorption of the administered drug, increased accumulation of the administered drug at the desired target, and the ability to administer RNAi agent into the skin. In some implementations, liposomes are used for delivering RNAi agent to epidermal cells and also to enhance the penetration of RNAi agent into dermal tissues, e.g., into skin. For example, the liposomes can be applied topically. Topical delivery of drugs formulated as liposomes to the skin has been documented (see, e.g., Weiner et al., (1992) Journal of Drug Targeting, vol. 2, 405-410 and du Plessis et al., (1992) Antiviral Research, 18:259-265; Mannino, R. J. and Fould-Fogerite, S., (1998) Biotechniques 6:682-690; Itani, T. et al., (1987) Gene 56:267-276; Nicolau, C. et al. (1987) Meth. Enzymol. 149:157-176; Straubinger, R. M. and Papahadjopoulos, D. (1983) Meth. Enzymol. 101:512-527; Wang, C. Y. and Huang, L., (1987) Proc. Natl. Acad. Sci. USA 84:7851-7855).

[0707] Non-ionic liposomal systems have also been examined to determine their utility in the delivery of drugs to the skin, in particular systems comprising non-ionic surfactant and cholesterol. Non-ionic liposomal formulations comprising Novasome I (glyceryl dilaurate/cholesterol/polyoxyethylene-10-stearyl ether) and Novasome II (glyceryl distearate/cholesterol/polyoxyethylene-10-stearyl ether) were used to deliver a drug into the dermis of mouse skin. Such formulations with RNAi agent are useful for treating a dermatological disorder.

[0708] Liposomes that include RNAi agents can be made highly deformable. Such deformability can enable the liposomes to penetrate through pore that are smaller than the average radius of the liposome. For example, transfersomes are a type of deformable liposomes. Transferosomes can be made by adding surface edge activators, usually surfactants, to a standard liposomal composition. Transfersomes that include RNAi agent can be delivered, for example, subcutaneously by infection in order to deliver RNAi agent to keratinocytes in the skin. In order to cross intact mammalian skin, lipid vesicles must pass through a series of fine pores, each with a diameter less than 50 nm, under the influence of a suitable transdermal gradient. In addition, due to the lipid properties, these transferosomes can be self-optimizing (adaptive to the shape of pores, e.g., in the skin), self-repairing, and can frequently reach their targets without fragmenting, and often self-loading.

[0709] Other formulations amenable to the present disclosure are described in PCT publication No. WO 2008/042973.

[0710] Transfersomes, yet another type of liposomes, are highly deformable lipid aggregates which are attractive candidates for drug delivery vehicles. Transfersomes can be described as lipid droplets which are so highly deformable that they are easily able to penetrate through pores which are smaller than the droplet. Transfersomes are adaptable to the environment in which they are used, e.g., they are self-optimizing (adaptive to the shape of pores in the skin), self-repairing, frequently reach their targets without fragmenting, and often self-loading. To make transfersomes it is possible to add surface edge-activators, usually surfactants, to a standard liposomal composition. Transfersomes have been used to deliver serum albumin to the skin. The transfersome-mediated delivery of serum albumin has been shown to be as effective as subcutaneous injection of a solution containing serum albumin.

[0711] Surfactants find wide application in formulations such as those described herein, particularlay in emulsions (including microemulsions) and liposomes. The most common way of classifying and ranking the properties of the many different types of surfactants, both natural and synthetic, is by the use of the hydrophile/lipophile balance (HLB). The nature of the hydrophilic group (also known as the “head”) provides the most useful means for categorizing the different surfactants used in formulations (Rieger, in Pharmaceutical Dosage Forms, Marcel Dekker, Inc., New York, N.Y., 1988, p. 285).

[0712] If the surfactant molecule is not ionized, it is classified as a nonionic surfactant. Nonionic surfactants find wide application in pharmaceutical and cosmetic products and are usable over a wide range of pH values. In general, their HLB values range from 2 to about 18 depending on their structure. Nonionic surfactants include nonionic esters such as ethylene glycol esters, propylene glycol esters, glyceryl esters, polyglyceryl esters, sorbitan esters, sucrose esters, and ethoxylated esters. Nonionic alkanolamides and ethers such as fatty alcohol ethoxylates, propoxylated alcohols, and ethoxylated/propoxylated block polymers are also included in this class. The polyoxyethylene surfactants are the most popular members of the nonionic surfactant class.

[0713] If the surfactant molecule carries a negative charge when it is dissolved or dispersed in water, the surfactant is classified as anionic. Anionic surfactants include carboxylates such as soaps, acyl lactylates, acyl amides of amino acids, esters of sulfuric acid such as alkyl sulfates and ethoxylated alkyl sulfates, sulfonates such as alkyl benzene sulfonates, acyl isethionates, acyl taurates and sulfosuccinates, and phosphates. The most important members of the anionic surfactant class are the alkyl sulfates and the soaps.

[0714] If the surfactant molecule carries a positive charge when it is dissolved or dispersed in water, the surfactant is classified as cationic. Cationic surfactants include quaternary ammonium salts and ethoxylated amines. The quaternary ammonium salts are the most used members of this class.

[0715] If the surfactant molecule has the ability to carry either a positive or negative charge, the surfactant is classified as amphoteric. Amphoteric surfactants include acrylic acid derivatives, substituted alkylamides, N-alkylbetaines and phosphatides.

The use of surfactants in drug products, formulations and in emulsions has been reviewed (Rieger, in Pharmaceutical Dosage Forms, Marcel Dekker, Inc., New York, N.Y., 1988, p. 285).

[0716] The RNAi agent for use in the methods of the disclosure can also be provided as micellar formulations. “Micelles” are defined herein as a particular type of molecular assembly in which amphipathic molecules are arranged in a spherical structure such that all the hydrophobic portions of the molecules are directed inward, leaving the hydrophilic portions in contact with the surrounding aqueous phase. The converse arrangement exists if the environment is hydrophobic.

[0717] A mixed micellar formulation suitable for delivery through transdermal membranes may be prepared by mixing an aqueous solution of the siRNA composition, an alkali metal C₈ to C₂₂ alkyl sulphate, and a micelle forming compounds. Exemplary micelle forming compounds include lecithin, hyaluronic acid, pharmaceutically acceptable salts of hyaluronic acid, glycolic acid, lactic acid, chamomile extract, cucumber extract, oleic acid, linoleic acid, linolenic acid, monoolein, monooleates, monolaurates, borage oil, evening of primrose oil, menthol, trihydroxy oxo cholanyl glycine and pharmaceutically acceptable salts thereof, glycerin, polyglycerin, lysine, polylysine, triolein, polyoxyethylene ethers and analogues thereof, polidocanol alkyl ethers and analogues thereof, chenodeoxycholate, deoxycholate, and mixtures thereof. The micelle forming compounds may be added at the same time or after addition of the alkali metal alkyl sulphate. Mixed micelles will form with substantially any kind of mixing of the ingredients but vigorous mixing in order to provide smaller size micelles.

[0718] In one method a first micellar composition is prepared which contains the siRNA composition and at least the alkali metal alkyl sulphate. The first micellar composition is then mixed with at least three micelle forming compounds to form a mixed micellar composition. In another method, the micellar composition is prepared by mixing the siRNA composition, the alkali metal alkyl sulphate and at least one of the micelle forming compounds, followed by addition of the remaining micelle forming compounds, with vigorous mixing.

[0719] Phenol or m-cresol may be added to the mixed micellar composition to stabilize the formulation and protect against bacterial growth. Alternatively, phenol or m-cresol may be added with the micelle forming ingredients. An isotonic agent such as glycerin may also be added after formation of the mixed micellar composition.

[0720] For delivery of the micellar formulation as a spray, the formulation can be put into an aerosol dispenser and the dispenser is charged with a propellant. The propellant, which is under pressure, is in liquid form in the dispenser. The ratios of the ingredients are adjusted so that the aqueous and propellant phases become one, i.e., there is one phase. If there are two phases, it is necessary to shake the dispenser prior to dispensing a portion of the contents, e.g., through a metered valve. The dispensed dose of pharmaceutical agent is propelled from the metered valve in a fine spray.

[0721] Propellants may include hydrogen-containing chlorofluorocarbons, hydrogen-containing fluorocarbons, dimethyl ether and diethyl ether. In certain embodiments, HFA 134a (1,1,1,2 tetrafluoroethane) may be used.

[0722] The specific concentrations of the essential ingredients can be determined by relatively straightforward experimentation. For absorption through the oral cavities, it is often desirable to increase, e.g., at least double or triple, the dosage for through injection or administration through the gastrointestinal tract.

[0723] Lipid Particles

[0724] RNAi agents, e.g., dsRNAs of in the disclosure may be fully encapsulated in a lipid formulation, e.g., a LNP, or other nucleic acid-lipid particle.

[0725] As used herein, the term “LNP” refers to a stable nucleic acid-lipid particle. LNPs typically contain a cationic lipid, a non-cationic lipid, and a lipid that prevents aggregation of the particle (e.g., a PEG-lipid conjugate). LNPs are extremely useful for systemic applications, as they exhibit extended circulation lifetimes following intravenous (i.v.) injection and accumulate at distal sites (e.g., sites physically separated from the administration site). LNPs include “pSPLP,” which include an encapsulated condensing agent-nucleic acid complex as set forth in WO 00/03683. The particles of the present disclosure typically have a mean diameter of about 50 nm to about 150 nm, more typically about 60 nm to about 130 nm, more typically about 70 nm to about 110 nm, most typically about 70 nm to about 90 nm, and are substantially nontoxic. In addition, the nucleic acids when present in the nucleic acid-lipid particles of the present disclosure are resistant in aqueous solution to degradation with a nuclease. Nucleic acid-lipid particles and their method of preparation are disclosed in, e.g., U.S. Pat. Nos. 5,976,567; 5,981,501; 6,534,484; 6,586,410; 6,815,432; United States Patent publication No. 2010/0324120 and WO 96/40964.

[0726] In one embodiment, the lipid to drug ratio (mass/mass ratio) (e.g., lipid to dsRNA ratio) will be in the range of from about 1:1 to about 50:1, from about 1:1 to about 25:1, from about 3:1 to about 15:1, from about 4:1 to about 10:1, from about 5:1 to about 9:1, or about 6:1 to about 9:1. Ranges intermediate to the above recited ranges are also contemplated to be part of the disclosure.

[0727] Certain specific LNP formulations for delivery of RNAi agents have been described in the art, including, e.g., “LNP01” formulations as described in, e.g., WO 2008/042973, which is hereby incorporated by reference.

Additional exemplary lipid-dsRNA formulations are identified in the table below.

| | | cationic lipid/non-cationic |
|---|---|---|
| | | lipid/cholesterol/PEG-lipid |
| | | conjugate |
| | Ionizable/Cationic Lipid | Lipid:siRNA ratio |
| SNALP-1 | 1,2-Dilinolenyloxy-N,N- | DLinDMA/DPPC/Cholesterol/PEG- |
| | dimethylaminopropane (DLinDMA) | CDMA |
| | | (57.1/7.1/34.4/1.4) |
| | | lipid:siRNA~7:1 |
| 2-XTC | 2,2-Dilinoleyl-4-dimethylaminoethyl- | XTC/DPPC/Cholesterol/PEG-cDMA |
| | [1,3]-dioxolane (XTC) | 57.1/7.1/34.4/1.4 |
| | | lipid:siRNA~7:1 |
| LNP05 | 2,2-Dilinoleyl-4-dimethylaminoethyl- | XTC/DSPC/Cholesterol/PEG-DMG |
| | [1,3]-dioxolane (XTC) | 57.5/7.5/31.5/3.5 |
| | | lipid:siRNA~6:1 |
| LNP06 | 2,2-Dilinoleyl-4-dimethylaminoethyl- | XTC/DSPC/Cholesterol/PEG-DMG |
| | [1,3]-dioxolane (XTC) | 57.5/7.5/31.5/3.5 |
| | | lipid:siRNA~11:1 |
| LNP07 | 2,2-Dilinoleyl-4-dimethylaminoethyl- | XTC/DSPC/Cholesterol/PEG-DMG |
| | [1,3]-dioxolane (XTC) | 60/7.5/31/1.5, |
| | | lipid:siRNA~6:1 |
| LNP08 | 2,2-Dilinoleyl-4-dimethylaminoethyl- | XTC/DSPC/Cholesterol/PEG-DMG |
| | [1,3]-dioxolane (XTC) | 60/7.5/31/1.5, |
| | | lipid:siRNA~11:1 |
| LNP09 | 2,2-Dilinoleyl-4-dimethylaminoethyl- | XTC/DSPC/Cholesterol/PEG-DMG |
| | [1,3]-dioxolane (XTC) | 50/10/38.5/1.5 |
| | | Lipid:siRNA 10:1 |
| LNP10 | (3aR,5s,6aS)-N,N-dimethyl-2,2- | ALN100/DSPC/Cholesterol/PEG- |
| | di((9Z,12Z)-octadeca-9,12- | DMG |
| | dienyl)tetrahydro-3aH- | 50/10/38.5/1.5 |
| | cyclopenta[d][1,3]dioxol-5-amine | Lipid:siRNA 10:1 |
| | (ALN100) | |
| LNP11 | (6Z,9Z,28Z,31Z)-heptatriaconta- | MC-3/DSPC/Cholesterol/PEG-DMG |
| | 6,9,28,31-tetraen-19-yl 4- | 50/10/38.5/1.5 |
| | (dimethylamino)butanoate (MC3) | Lipid:siRNA 10:1 |
| LNP12 | 1,1′-(2-(4-(2-((2-(bis(2- | Tech G1/DSPC/Cholesterol/PEG- |
| | hydroxydodecyl)amino)ethyl)(2- | DMG |
| | hydroxydodecyl)amino)ethyl)piperazin- | 50/10/38.5/1.5 |
| | 1-yl)ethylazanediyl)didodecan-2-ol | Lipid:siRNA 10:1 |
| | (Tech G1) | |
| LNP13 | XTC | XTC/DSPC/Chol/PEG-DMG |
| | | 50/10/38.5/1.5 |
| | | Lipid:siRNA:33:1 |
| LNP14 | MC3 | MC3/DSPC/Chol/PEG-DMG |
| | | 40/15/40/5 |
| | | Lipid:siRNA:11:1 |
| LNP15 | MC3 | MC3/DSPC/Chol/PEG-DSG/GalNAc- |
| | | PEG-DSG |
| | | 50/10/35/4.5/0.5 |
| | | Lipid:siRNA:11:1 |
| LNP16 | MC3 | MC3/DSPC/Chol/PEG-DMG |
| | | 50/10/38.5/1.5 |
| | | Lipid:siRNA:7:1 |
| LNP17 | MC3 | MC3/DSPC/Chol/PEG-DSG |
| | | 50/10/38.5/1.5 |
| | | Lipid:siRNA:10:1 |
| LNP18 | MC3 | MC3/DSPC/Chol/PEG-DMG |
| | | 50/10/38.5/1.5 |
| | | Lipid:siRNA:12:1 |
| LNP19 | MC3 | MC3/DSPC/Chol/PEG-DMG |
| | | 50/10/35/5 |
| | | Lipid:siRNA:8:1 |
| LNP20 | MC3 | MC3/DSPC/Chol/PEG-DPG |
| | | 50/10/38.5/1.5 |
| | | Lipid:siRNA:10:1 |
| LNP21 | C12-200 | C12-200/DSPC/Chol/PEG-DSG |
| | | 50/10/38.5/1.5 |
| | | Lipid:siRNA:7:1 |
| LNP22 | XTC | XTC/DSPC/Chol/PEG-DSG |
| | | 50/10/38.5/1.5 |
| | | Lipid:siRNA:10:1 |

DSPC: distearoylphosphatidylcholine
DPPC: dipalmitoylphosphatidylcholine
PEG-DMG: PEG-didimyristoyl glycerol (C14-PEG, or PEG-C14) (PEG with avg mol wt of 2000)
PEG-DSG: PEG-distyryl glycerol (C18-PEG, or PEG-C18) (PEG with avg mol wt of 2000)
PEG-cDMA: PEG-carbamoyl-1,2-dimyristyloxypropylamine (PEG with avg mol wt of 2000)
SNALP (1,2-Dilinolenyloxy-N,N-dimethylaminopropane (DLinDMA)) comprising formulations are described in WO 2009/127060, which is hereby incorporated by reference.
XTC comprising formulations are described in WO 2010/088537, the entire contents of which are hereby incorporated herein by reference.
MC3 comprising formulations are described, e.g., in U.S. Patent Publication No. 2010/0324120, the entire contents of which are hereby incorporated by reference.
ALNY-100 comprising formulations are described in WO 2010/054406, the entire contents of which are hereby incorporated herein by reference.
C12-200 comprising formulations are described in WO 2010/129709, the entire contents of which are hereby incorporated herein by reference.

[0728] Compositions and formulations for oral administration include powders or granules, microparticulates, nanoparticulates, suspensions or solutions in water or non-aqueous media, capsules, gel capsules, sachets, tablets or minitablets. Thickeners, flavoring agents, diluents, emulsifiers, dispersing aids or binders can be desirable. In some embodiments, oral formulations are those in which dsRNAs featured in the disclosure are administered in conjunction with one or more penetration enhancer surfactants and chelators. Suitable surfactants include fatty acids or esters or salts thereof, bile acids or salts thereof. Suitable bile acids/salts include chenodeoxycholic acid (CDCA) and ursodeoxychenodeoxycholic acid (UDCA), cholic acid, dehydrocholic acid, deoxycholic acid, glucholic acid, glycholic acid, glycodeoxycholic acid, taurocholic acid, taurodeoxycholic acid, sodium tauro-24,25-dihydro-fusidate and sodium glycodihydrofusidate. Suitable fatty acids include arachidonic acid, undecanoic acid, oleic acid, lauric acid, caprylic acid, capric acid, myristic acid, palmitic acid, stearic acid, linoleic acid, linolenic acid, dicaprate, tricaprate, monoolein, dilaurin, glyceryl 1-monocaprate, 1-dodecylazacycloheptan−2-one, an acylcarnitine, an acylcholine, or a monoglyceride, a diglyceride or a pharmaceutically acceptable salt thereof (e.g., sodium). In some embodiments, combinations of penetration enhancers are used, for example, fatty acids/salts in combination with bile acids/salts. One exemplary combination is the sodium salt of lauric acid, capric acid and UDCA. Further penetration enhancers include polyoxyethylene-9-lauryl ether, polyoxyethylene-20-cetyl ether. DsRNAs featured in the disclosure can be delivered orally, in granular form including sprayed dried particles, or complexed to form micro or nanoparticles. DsRNA complexing agents include poly-amino acids; polyimines; polyacrylates; polyalkylacrylates, polyoxethanes, polyalkylcyanoacrylates; cationized gelatins, albumins, starches, acrylates, polyethyleneglycols (PEG) and starches; polyalkylcyanoacrylates; DEAE-derivatized polyimines, pollulans, celluloses and starches. Suitable complexing agents include chitosan, N-trimethylchitosan, poly-L-lysine, polyhistidine, polyornithine, polyspermines, protamine, polyvinylpyridine, polythiodiethylaminomethylethylene P(TDAE), polyaminostyrene (e.g., p-amino), poly(methylcyanoacrylate), poly(ethylcyanoacrylate), poly(butylcyanoacrylate), poly(isobutylcyanoacrylate), poly(isohexylcynaoacrylate), DEAE-methacrylate, DEAE-hexylacrylate, DEAE-acrylamide, DEAE-albumin and DEAE-dextran, polymethylacrylate, polyhexylacrylate, poly(D,L-lactic acid), poly(DL-lactic-co-glycolic acid (PLGA), alginate, and polyethyleneglycol (PEG). Oral formulations for dsRNAs and their preparation are described in detail in U.S. Pat. No. 6,887,906, U.S. 2003/0027780, and U.S. Pat. No. 6,747,014, each of which is incorporated herein by reference.

[0729] Compositions and formulations for parenteral, intraparenchymal (into the brain), intrathecal, intraventricular or intrahepatic administration can include sterile aqueous solutions which can also contain buffers, diluents and other suitable additives such as, but not limited to, penetration enhancers, carrier compounds and other pharmaceutically acceptable carriers or excipients.

[0730] Pharmaceutical compositions of the present disclosure include, but are not limited to, solutions, emulsions, and liposome-containing formulations. These compositions can be generated from a variety of components that include, but are not limited to, preformed liquids, self-emulsifying solids and self-emulsifying semisolids. Particularly useful formulations include those that target the brain when treating SOD-1-associated diseases or disorders.

[0731] The pharmaceutical formulations of the present disclosure, which can conveniently be presented in unit dosage form, can be prepared according to conventional techniques well known in the pharmaceutical industry. Such techniques include the step of bringing into association the active ingredients with the pharmaceutical carrier(s) or excipient(s). In general, the formulations are prepared by uniformly and intimately bringing into association the active ingredients with liquid carriers or finely divided solid carriers or both, and then, if necessary, shaping the product.

[0732] The compositions of the present disclosure can be formulated into any of many possible dosage forms such as, but not limited to, tablets, capsules, gel capsules, liquid syrups, soft gels, suppositories, and enemas. The compositions of the present disclosure can also be formulated as suspensions in aqueous, non-aqueous or mixed media. Aqueous suspensions can further contain substances which increase the viscosity of the suspension including, for example, sodium carboxymethylcellulose, sorbitol or dextran. The suspension can also contain stabilizers.

[0733] Additional Formulations

[0734] i. Emulsions

[0735] The compositions of the present disclosure can be prepared and formulated as emulsions. Emulsions are typically heterogeneous systems of one liquid dispersed in another in the form of droplets usually exceeding 0.1 m in diameter (see e.g., Ansel's Pharmaceutical Dosage Forms and Drug Delivery Systems, Allen, LV., Popovich N G., and Ansel H C., 2004, Lippincott Williams & Wilkins (8th ed.), New York, NY; Idson, in Pharmaceutical Dosage Forms, Lieberman, Rieger and Banker (Eds.), 1988, Marcel Dekker, Inc., New York, N.Y., volume 1, p. 199; Rosoff, in Pharmaceutical Dosage Forms, Lieberman, Rieger and Banker (Eds.), 1988, Marcel Dekker, Inc., New York, N.Y., Volume 1, p. 245; Block in Pharmaceutical Dosage Forms, Lieberman, Rieger and Banker (Eds.), 1988, Marcel Dekker, Inc., New York, N.Y., volume 2, p. 335; Higuchi et al., in Remington's Pharmaceutical Sciences, Mack Publishing Co., Easton, Pa., 1985, p. 301). Emulsions are often biphasic systems comprising two immiscible liquid phases intimately mixed and dispersed with each other. In general, emulsions can be of either the water-in-oil (w/o) or the oil-in-water (o/w) variety. When an aqueous phase is finely divided into and dispersed as minute droplets into a bulk oily phase, the resulting composition is called a water-in-oil (w/o) emulsion. Alternatively, when an oily phase is finely divided into and dispersed as minute droplets into a bulk aqueous phase, the resulting composition is called an oil-in-water (o/w) emulsion. Emulsions can contain additional components in addition to the dispersed phases, and the active drug which can be present as a solution in either aqueous phase, oily phase or itself as a separate phase. Pharmaceutical excipients such as emulsifiers, stabilizers, dyes, and anti-oxidants can also be present in emulsions as needed. Pharmaceutical emulsions can also be multiple emulsions that are comprised of more than two phases such as, for example, in the case of oil-in-water-in-oil (o/w/o) and water-in-oil-in-water (w/o/w) emulsions. Such complex formulations often provide certain advantages that simple binary emulsions do not. Multiple emulsions in which individual oil droplets of an o/w emulsion enclose small water droplets constitute a w/o/w emulsion. Likewise, a system of oil droplets enclosed in globules of water stabilized in an oily continuous phase provides an o/w/o emulsion.

[0736] Emulsions are characterized by little or no thermodynamic stability. Often, the dispersed or discontinuous phase of the emulsion is well dispersed into the external or continuous phase and maintained in this form through the means of emulsifiers or the viscosity of the formulation. Either of the phases of the emulsion can be a semisolid or a solid, as is the case of emulsion-style ointment bases and creams. Other means of stabilizing emulsions entail the use of emulsifiers that can be incorporated into either phase of the emulsion. Emulsifiers can broadly be classified into four categories: synthetic surfactants, naturally occurring emulsifiers, absorption bases, and finely dispersed solids (see e.g., Ansel's Pharmaceutical Dosage Forms and Drug Delivery Systems, Allen, LV., Popovich N G., and Ansel H C., 2004, Lippincott Williams & Wilkins (8th ed.), New York, NY; Idson, in Pharmaceutical Dosage Forms, Lieberman, Rieger and Banker (Eds.), 1988, Marcel Dekker, Inc., New York, N.Y., volume 1, p. 199).

[0737] Synthetic surfactants, also known as surface active agents, have found wide applicability in the formulation of emulsions and have been reviewed in the literature (see e.g., Ansel's Pharmaceutical Dosage Forms and Drug Delivery Systems, Allen, LV., Popovich N G., and Ansel H C., 2004, Lippincott Williams & Wilkins (8th ed.), New York, NY; Rieger, in Pharmaceutical Dosage Forms, Lieberman, Rieger and Banker (Eds.), 1988, Marcel Dekker, Inc., New York, N.Y., volume 1, p. 285; Idson, in Pharmaceutical Dosage Forms, Lieberman, Rieger and Banker (Eds.), Marcel Dekker, Inc., New York, N.Y., 1988, volume 1, p. 199). Surfactants are typically amphiphilic and comprise a hydrophilic and a hydrophobic portion. The ratio of the hydrophilic to the hydrophobic nature of the surfactant has been termed the hydrophile/lipophile balance (HLB) and is a valuable tool in categorizing and selecting surfactants in the preparation of formulations. Surfactants can be classified into different classes based on the nature of the hydrophilic group: nonionic, anionic, cationic and amphoteric (see e.g., Ansel's Pharmaceutical Dosage Forms and Drug Delivery Systems, Allen, LV., Popovich N G., and Ansel H C., 2004, Lippincott Williams & Wilkins (8th ed.), New York, NY Rieger, in Pharmaceutical Dosage Forms, Lieberman, Rieger and Banker (Eds.), 1988, Marcel Dekker, Inc., New York, N.Y., volume 1, p. 285).

[0738] Naturally occurring emulsifiers used in emulsion formulations include lanolin, beeswax, phosphatides, lecithin and acacia. Absorption bases possess hydrophilic properties such that they can soak up water to form w/o emulsions yet retain their semisolid consistencies, such as anhydrous lanolin and hydrophilic petrolatum. Finely divided solids have also been used as good emulsifiers especially in combination with surfactants and in viscous preparations. These include polar inorganic solids, such as heavy metal hydroxides, nonswelling clays such as bentonite, attapulgite, hectorite, kaolin, montmorillonite, colloidal aluminum silicate and colloidal magnesium aluminum silicate, pigments and nonpolar solids such as carbon or glyceryl tristearate.

[0739] A large variety of non-emulsifying materials are also included in emulsion formulations and contribute to the properties of emulsions. These include fats, oils, waxes, fatty acids, fatty alcohols, fatty esters, humectants, hydrophilic colloids, preservatives and antioxidants (Block, in Pharmaceutical Dosage Forms, Lieberman, Rieger and Banker (Eds.), 1988, Marcel Dekker, Inc., New York, N.Y., volume 1, p. 335; Idson, in Pharmaceutical Dosage Forms, Lieberman, Rieger and Banker (Eds.), 1988, Marcel Dekker, Inc., New York, N.Y., volume 1, p. 199).

[0740] Hydrophilic colloids or hydrocolloids include naturally occurring gums and synthetic polymers such as polysaccharides (for example, acacia, agar, alginic acid, carrageenan, guar gum, karaya gum, and tragacanth), cellulose derivatives (for example, carboxymethylcellulose and carboxypropylcellulose), and synthetic polymers (for example, carbomers, cellulose ethers, and carboxyvinyl polymers). These disperse or swell in water to form colloidal solutions that stabilize emulsions by forming strong interfacial films around the dispersed-phase droplets and by increasing the viscosity of the external phase.

[0741] Since emulsions often contain a number of ingredients such as carbohydrates, proteins, sterols and phosphatides that can readily support the growth of microbes, these formulations often incorporate preservatives. Commonly used preservatives included in emulsion formulations include methyl paraben, propyl paraben, quaternary ammonium salts, benzalkonium chloride, esters of p-hydroxybenzoic acid, and boric acid. Antioxidants are also commonly added to emulsion formulations to prevent deterioration of the formulation. Antioxidants used can be free radical scavengers such as tocopherols, alkyl gallates, butylated hydroxyanisole, butylated hydroxytoluene, or reducing agents such as ascorbic acid and sodium metabisulfite, and antioxidant synergists such as citric acid, tartaric acid, and lecithin.

[0742] The application of emulsion formulations via dermatological, oral and parenteral routes and methods for their manufacture have been reviewed in the literature (see e.g., Ansel's Pharmaceutical Dosage Forms and Drug Delivery Systems, Allen, LV., Popovich N G., and Ansel H C., 2004, Lippincott Williams & Wilkins (8th ed.), New York, NY; Idson, in Pharmaceutical Dosage Forms, Lieberman, Rieger and Banker (Eds.), 1988, Marcel Dekker, Inc., New York, N.Y., volume 1, p. 199). Emulsion formulations for oral delivery have been very widely used because of ease of formulation, as well as efficacy from an absorption and bioavailability standpoint (see e.g., Ansel's Pharmaceutical Dosage Forms and Drug Delivery Systems, Allen, LV., Popovich N G., and Ansel H C., 2004, Lippincott Williams & Wilkins (8th ed.), New York, NY; Rosoff, in Pharmaceutical Dosage Forms, Lieberman, Rieger and Banker (Eds.), 1988, Marcel Dekker, Inc., New York, N.Y., volume 1, p. 245; Idson, in Pharmaceutical Dosage Forms, Lieberman, Rieger and Banker (Eds.), 1988, Marcel Dekker, Inc., New York, N.Y., volume 1, p. 199). Mineral-oil base laxatives, oil-soluble vitamins and high fat nutritive preparations are among the materials that have commonly been administered orally as o/w emulsions.

[0743] ii. Microemulsions

[0744] In one embodiment of the present disclosure, the compositions of RNAi agents and nucleic acids are formulated as microemulsions. A microemulsion can be defined as a system of water, oil and amphiphile which is a single optically isotropic and thermodynamically stable liquid solution (see e.g., Ansel's Pharmaceutical Dosage Forms and Drug Delivery Systems, Allen, LV., Popovich N G., and Ansel H C., 2004, Lippincott Williams & Wilkins (8th ed.), New York, NY; Rosoff, in Pharmaceutical Dosage Forms, Lieberman, Rieger and Banker (Eds.), 1988, Marcel Dekker, Inc., New York, N.Y., volume 1, p. 245). Typically, microemulsions are systems that are prepared by first dispersing an oil in an aqueous surfactant solution and then adding a sufficient amount of a fourth component, generally an intermediate chain-length alcohol to form a transparent system. Therefore, microemulsions have also been described as thermodynamically stable, isotropically clear dispersions of two immiscible liquids that are stabilized by interfacial films of surface-active molecules (Leung and Shah, in: Controlled Release of Drugs: Polymers and Aggregate Systems, Rosoff, M., Ed., 1989, VCH Publishers, New York, pages 185-215). Microemulsions commonly are prepared via a combination of three to five components that include oil, water, surfactant, cosurfactant and electrolyte. Whether the microemulsion is of the water-in-oil (w/o) or an oil-in-water (o/w) type is dependent on the properties of the oil and surfactant used, and on the structure and geometric packing of the polar heads and hydrocarbon tails of the surfactant molecules (Schott, in Remington's Pharmaceutical Sciences, Mack Publishing Co., Easton, Pa., 1985, p. 271).

[0745] The phenomenological approach utilizing phase diagrams has been extensively studied and has yielded a comprehensive knowledge, to one skilled in the art, of how to formulate microemulsions (see e.g., Ansel's Pharmaceutical Dosage Forms and Drug Delivery Systems, Allen, LV., Popovich N G., and Ansel H C., 2004, Lippincott Williams & Wilkins (8th ed.), New York, NY; Rosoff, in Pharmaceutical Dosage Forms, Lieberman, Rieger and Banker (Eds.), 1988, Marcel Dekker, Inc., New York, N.Y., volume 1, p. 245; Block, in Pharmaceutical Dosage Forms, Lieberman, Rieger and Banker (Eds.), 1988, Marcel Dekker, Inc., New York, N.Y., volume 1, p. 335). Compared to conventional emulsions, microemulsions offer the advantage of solubilizing water-insoluble drugs in a formulation of thermodynamically stable droplets that are formed spontaneously.

[0746] Surfactants used in the preparation of microemulsions include, but are not limited to, ionic surfactants, non-ionic surfactants, Brij 96, polyoxyethylene oleyl ethers, polyglycerol fatty acid esters, tetraglycerol monolaurate (ML310), tetraglycerol monooleate (MO310), hexaglycerol monooleate (PO310), hexaglycerol pentaoleate (PO500), decaglycerol monocaprate (MCA750), decaglycerol monooleate (MO750), decaglycerol sequioleate (SO750), decaglycerol decaoleate (DAO750), alone or in combination with cosurfactants. The cosurfactant, usually a short-chain alcohol such as ethanol, 1-propanol, and 1-butanol, serves to increase the interfacial fluidity by penetrating into the surfactant film and consequently creating a disordered film because of the void space generated among surfactant molecules. Microemulsions can, however, be prepared without the use of cosurfactants and alcohol-free self-emulsifying microemulsion systems are known in the art. The aqueous phase can typically be, but is not limited to, water, an aqueous solution of the drug, glycerol, PEG300, PEG400, polyglycerols, propylene glycols, and derivatives of ethylene glycol. The oil phase can include, but is not limited to, materials such as Captex 300, Captex 355, Capmul MCM, fatty acid esters, medium chain (C8-C12) mono, di, and tri-glycerides, polyoxyethylated glyceryl fatty acid esters, fatty alcohols, polyglycolized glycerides, saturated polyglycolized C8-C10 glycerides, vegetable oils and silicone oil.

[0747] Microemulsions are particularly of interest from the standpoint of drug solubilization and the enhanced absorption of drugs. Lipid based microemulsions (both o/w and w/o) have been proposed to enhance the oral bioavailability of drugs, including peptides (see e.g., U.S. Pat. Nos. 6,191,105; 7,063,860; 7,070,802; 7,157,099; Constantinides et al., Pharmaceutical Research, 1994, 11, 1385-1390; Ritschel, Meth. Find. Exp. Clin. Pharmacol., 1993, 13, 205). Microemulsions afford advantages of improved drug solubilization, protection of drug from enzymatic hydrolysis, possible enhancement of drug absorption due to surfactant-induced alterations in membrane fluidity and permeability, ease of preparation, ease of oral administration over solid dosage forms, improved clinical potency, and decreased toxicity (see e.g., U.S. Pat. Nos. 6,191,105; 7,063,860; 7,070,802; 7,157,099; Constantinides et al., Pharmaceutical Research, 1994, 11, 1385; Ho et al., J. Pharm. Sci., 1996, 85, 138-143). Often microemulsions can form spontaneously when their components are brought together at ambient temperature. This can be particularly advantageous when formulating thermolabile drugs, peptides or RNAi agents. Microemulsions have also been effective in the transdermal delivery of active components in both cosmetic and pharmaceutical applications. It is expected that the microemulsion compositions and formulations of the present disclosure will facilitate the increased systemic absorption of RNAi agents and nucleic acids from the gastrointestinal tract, as well as improve the local cellular uptake of RNAi agents and nucleic acids.

[0748] Microemulsions of the present disclosure can also contain additional components and additives such as sorbitan monostearate (Grill 3), Labrasol, and penetration enhancers to improve the properties of the formulation and to enhance the absorption of the RNAi agents and nucleic acids of the present disclosure. Penetration enhancers used in the microemulsions of the present disclosure can be classified as belonging to one of five broad categories—surfactants, fatty acids, bile salts, chelating agents, and non-chelating non-surfactants (Lee et al., Critical Reviews in Therapeutic Drug Carrier Systems, 1991, p. 92). Each of these classes has been discussed above.

[0749] iii. Microparticles

[0750] An RNAi agent of the disclosure may be incorporated into a particle, e.g., a microparticle. Microparticles can be produced by spray-drying, but may also be produced by other methods including lyophilization, evaporation, fluid bed drying, vacuum drying, or a combination of these techniques.

[0751] iv. Penetration Enhancers

[0752] In one embodiment, the present disclosure employs various penetration enhancers to effect the efficient delivery of nucleic acids, particularly RNAi agents, to the skin of animals. Most drugs are present in solution in both ionized and nonionized forms. However, usually only lipid soluble or lipophilic drugs readily cross cell membranes. It has been discovered that even non-lipophilic drugs can cross cell membranes if the membrane to be crossed is treated with a penetration enhancer. In addition to aiding the diffusion of non-lipophilic drugs across cell membranes, penetration enhancers also enhance the permeability of lipophilic drugs.

[0753] Penetration enhancers can be classified as belonging to one of five broad categories, i.e., surfactants, fatty acids, bile salts, chelating agents, and non-chelating non-surfactants (see e.g., Malmsten, M. Surfactants and polymers in drug delivery, Informa Health Care, New York, NY, 2002; Lee et al., Critical Reviews in Therapeutic Drug Carrier Systems, 1991, p. 92). Each of the above mentioned classes of penetration enhancers are described below in greater detail.

[0754] Surfactants (or “surface-active agents”) are chemical entities which, when dissolved in an aqueous solution, reduce the surface tension of the solution or the interfacial tension between the aqueous solution and another liquid, with the result that absorption of RNAi agents through the mucosa is enhanced. In addition to bile salts and fatty acids, these penetration enhancers include, for example, sodium lauryl sulfate, polyoxyethylene-9-lauryl ether and polyoxyethylene-20-cetyl ether) (see e.g., Malmsten, M. Surfactants and polymers in drug delivery, Informa Health Care, New York, NY, 2002; Lee et al., Critical Reviews in Therapeutic Drug Carrier Systems, 1991, p. 92); and perfluorochemical emulsions, such as FC-43. Takahashi et al., J. Pharm. Pharmacol., 1988, 40, 252).

[0755] Various fatty acids and their derivatives which act as penetration enhancers include, for example, oleic acid, lauric acid, capric acid (n-decanoic acid), myristic acid, palmitic acid, stearic acid, linoleic acid, linolenic acid, dicaprate, tricaprate, monoolein (1-monooleoyl-rac-glycerol), dilaurin, caprylic acid, arachidonic acid, glycerol 1-monocaprate, 1-dodecylazacycloheptan−2-one, acylcarnitines, acylcholines, C₁₋₂₀ alkyl esters thereof (e.g., methyl, isopropyl and t-butyl), and mono- and di-glycerides thereof (i.e., oleate, laurate, caprate, myristate, palmitate, stearate, linoleate, etc.) (see e.g., Touitou, E., et al. Enhancement in Drug Delivery, CRC Press, Danvers, M A, 2006; Lee et al., Critical Reviews in Therapeutic Drug Carrier Systems, 1991, p. 92; Muranishi, Critical Reviews in Therapeutic Drug Carrier Systems, 1990, 7, 1-33; El Hariri et al., J. Pharm. Pharmacol., 1992, 44, 651-654).

[0756] The physiological role of bile includes the facilitation of dispersion and absorption of lipids and fat-soluble vitamins (see e.g., Malmsten, M. Surfactants and polymers in drug delivery, Informa Health Care, New York, NY, 2002; Brunton, Chapter 38 in: Goodman & Gilman's The Pharmacological Basis of Therapeutics, 9th Ed., Hardman et al. Eds., McGraw-Hill, New York, 1996, pp. 934-935). Various natural bile salts, and their synthetic derivatives, act as penetration enhancers. Thus the term “bile salts” includes any of the naturally occurring components of bile as well as any of their synthetic derivatives. Suitable bile salts include, for example, cholic acid (or its pharmaceutically acceptable sodium salt, sodium cholate), dehydrocholic acid (sodium dehydrocholate), deoxycholic acid (sodium deoxycholate), glucholic acid (sodium glucholate), glycholic acid (sodium glycocholate), glycodeoxycholic acid (sodium glycodeoxycholate), taurocholic acid (sodium taurocholate), taurodeoxycholic acid (sodium taurodeoxycholate), chenodeoxycholic acid (sodium chenodeoxycholate), ursodeoxycholic acid (UDCA), sodium tauro-24,25-dihydro-fusidate (STDHF), sodium glycodihydrofusidate and polyoxyethylene-9-lauryl ether (POE) (see e.g., Malmsten, M. Surfactants and polymers in drug delivery, Informa Health Care, New York, NY, 2002; Lee et al., Critical Reviews in Therapeutic Drug Carrier Systems, 1991, page 92; Swinyard, Chapter 39 In: Remington's Pharmaceutical Sciences, 18th Ed., Gennaro, ed., Mack Publishing Co., Easton, Pa., 1990, pages 782-783; Muranishi, Critical Reviews in Therapeutic Drug Carrier Systems, 1990, 7, 1-33; Yamamoto et al., J. Pharm. Exp. Ther., 1992, 263, 25; Yamashita et al., J. Pharm. Sci., 1990, 79, 579-583).

[0757] Chelating agents, as used in connection with the present disclosure, can be defined as compounds that remove metallic ions from solution by forming complexes therewith, with the result that absorption of RNAi agents through the mucosa is enhanced. With regards to their use as penetration enhancers in the present disclosure, chelating agents have the added advantage of also serving as DNase inhibitors, as most characterized DNA nucleases require a divalent metal ion for catalysis and are thus inhibited by chelating agents (Jarrett, J. Chromatogr., 1993, 618, 315-339). Suitable chelating agents include but are not limited to disodium ethylenediaminetetraacetate (EDTA), citric acid, salicylates (e.g., sodium salicylate, 5-methoxysalicylate and homovanilate), N-acyl derivatives of collagen, laureth-9 and N-amino acyl derivatives of beta-diketones (enamines)(see e.g., Katdare, A. et al., Excipient development for pharmaceutical, biotechnology, and drug delivery, CRC Press, Danvers, M A, 2006; Lee et al., Critical Reviews in Therapeutic Drug Carrier Systems, 1991, page 92; Muranishi, Critical Reviews in Therapeutic Drug Carrier Systems, 1990, 7, 1-33; Buur et al., J. Control Rel., 1990, 14, 43-51).

[0758] As used herein, non-chelating non-surfactant penetration enhancing compounds can be defined as compounds that demonstrate insignificant activity as chelating agents or as surfactants but that nonetheless enhance absorption of RNAi agents through the alimentary mucosa (see e.g., Muranishi, Critical Reviews in Therapeutic Drug Carrier Systems, 1990, 7, 1-33). This class of penetration enhancers includes, for example, unsaturated cyclic ureas, 1-alkyl- and 1-alkenylazacyclo-alkanone derivatives (Lee et al., Critical Reviews in Therapeutic Drug Carrier Systems, 1991, page 92); and non-steroidal anti-inflammatory agents such as diclofenac sodium, indomethacin and phenylbutazone (Yamashita et al., J. Pharm. Pharmacol., 1987, 39, 621-626).

[0759] Agents that enhance uptake of RNAi agents at the cellular level can also be added to the pharmaceutical and other compositions of the present disclosure. For example, cationic lipids, such as lipofectin (Junichi et al, U.S. Pat. No. 5,705,188), cationic glycerol derivatives, and polycationic molecules, such as polylysine (WO 97/30731), are also known to enhance the cellular uptake of dsRNAs.

[0760] Other agents can be utilized to enhance the penetration of the administered nucleic acids, including glycols such as ethylene glycol and propylene glycol, pyrrols such as 2-pyrrol, azones, and terpenes such as limonene and menthone.

[0761] vi. Excipients

[0762] In contrast to a carrier compound, a “pharmaceutical carrier” or “excipient” is a pharmaceutically acceptable solvent, suspending agent or any other pharmacologically inert vehicle for delivering one or more nucleic acids to an animal. The excipient can be liquid or solid and is selected, with the planned manner of administration in mind, so as to provide for the desired bulk, consistency, etc., when combined with a nucleic acid and the other components of a given pharmaceutical composition. Typical pharmaceutical carriers include, but are not limited to, binding agents (e.g., pregelatinized maize starch, polyvinylpyrrolidone or hydroxypropyl methylcellulose, etc.); fillers (e.g., lactose and other sugars, microcrystalline cellulose, pectin, gelatin, calcium sulfate, ethyl cellulose, polyacrylates or calcium hydrogen phosphate, etc.); lubricants (e.g., magnesium stearate, talc, silica, colloidal silicon dioxide, stearic acid, metallic stearates, hydrogenated vegetable oils, corn starch, polyethylene glycols, sodium benzoate, sodium acetate, etc.); disintegrants (e.g., starch, sodium starch glycolate, etc.); and wetting agents (e.g., sodium lauryl sulphate, etc).

[0763] Pharmaceutically acceptable organic or inorganic excipients suitable for non-parenteral administration which do not deleteriously react with nucleic acids can also be used to formulate the compositions of the present disclosure. Suitable pharmaceutically acceptable carriers include, but are not limited to, water, salt solutions, alcohols, polyethylene glycols, gelatin, lactose, amylose, magnesium stearate, talc, silicic acid, viscous paraffin, hydroxymethylcellulose, polyvinylpyrrolidone and the like.

[0764] Formulations for topical administration of nucleic acids can include sterile and non-sterile aqueous solutions, non-aqueous solutions in common solvents such as alcohols, or solutions of the nucleic acids in liquid or solid oil bases. The solutions can also contain buffers, diluents and other suitable additives. Pharmaceutically acceptable organic or inorganic excipients suitable for non-parenteral administration which do not deleteriously react with nucleic acids can be used.

[0765] Suitable pharmaceutically acceptable excipients include, but are not limited to, water, salt solutions, alcohol, polyethylene glycols, gelatin, lactose, amylose, magnesium stearate, talc, silicic acid, viscous paraffin, hydroxymethylcellulose, polyvinylpyrrolidone and the like.

[0766] vii. Other Components

[0767] The compositions of the present disclosure can additionally contain other adjunct components conventionally found in pharmaceutical compositions, at their art-established usage levels. Thus, for example, the compositions can contain additional, compatible, pharmaceutically-active materials such as, for example, antipruritics, astringents, local anesthetics or anti-inflammatory agents, or can contain additional materials useful in physically formulating various dosage forms of the compositions of the present disclosure, such as dyes, flavoring agents, preservatives, antioxidants, opacifiers, thickening agents and stabilizers. However, such materials, when added, should not unduly interfere with the biological activities of the components of the compositions of the present disclosure. The formulations can be sterilized and, if desired, mixed with auxiliary agents, e.g., lubricants, preservatives, stabilizers, wetting agents, emulsifiers, salts for influencing osmotic pressure, buffers, colorings, flavorings or aromatic substances and the like which do not deleteriously interact with the nucleic acid(s) of the formulation.

[0768] Aqueous suspensions can contain substances which increase the viscosity of the suspension including, for example, sodium carboxymethylcellulose, sorbitol or dextran. The suspension can also contain stabilizers.

[0769] In some embodiments, pharmaceutical compositions featured in the disclosure include (a) one or more RNAi agents and (b) one or more agents which function by a non-RNAi mechanism and which are useful in treating a GSK3α-associated neurodegenerative disorder. Examples of such agents include, but are not limited to SSRIs, venlafaxine, bupropion, and atypical antipsychotics.

[0770] Toxicity and therapeutic efficacy of such compounds can be determined by standard pharmaceutical procedures in cell cultures or experimental animals, e.g., for determining the LD₅₀ (the dose lethal to 50% of the population) and the ED₅₀ (the dose therapeutically effective in 50% of the population). The dose ratio between toxic and therapeutic effects is the therapeutic index and it can be expressed as the ratio LD₅₀/ED₅₀. Compounds that exhibit high therapeutic indices are preferred.

[0771] The data obtained from cell culture assays and animal studies can be used in formulating a range of dosage for use in humans. The dosage of compositions featured herein in the disclosure lies generally within a range of circulating concentrations that include the ED₅₀ with little or no toxicity. The dosage can vary within this range depending upon the dosage form employed and the route of administration utilized. For any compound used in the methods featured in the disclosure, the therapeutically effective dose can be estimated initially from cell culture assays. A dose can be formulated in animal models to achieve a circulating plasma concentration range of the compound or, when appropriate, of the polypeptide product of a target sequence (e.g., achieving a decreased concentration of the polypeptide) that includes the IC₅₀ (i.e., the concentration of the test compound which achieves a half-maximal inhibition of symptoms) as determined in cell culture. Such information can be used to more accurately determine useful doses in humans. Levels in plasma can be measured, for example, by high performance liquid chromatography.

[0772] In addition to their administration, as discussed above, the RNAi agents featured in the disclosure can be administered in combination with other known agents effective in treatment of pathological processes mediated by nucleotide repeat expression. In any event, the administering physician can adjust the amount and timing of RNAi agent administration on the basis of results observed using standard measures of efficacy known in the art or described herein.

### VIII. Kits

[0773] In certain aspects, the instant disclosure provides kits that include a suitable container containing a pharmaceutical formulation of a siRNA compound, e.g., a double-stranded siRNA compound, or siRNA compound, (e.g., a precursor, e.g., a larger siRNA compound which can be processed into a siRNA compound, or a DNA which encodes an siRNA compound, e.g., a double-stranded siRNA compound, or siRNA compound, or precursor thereof). In certain embodiments the individual components of the pharmaceutical formulation may be provided in one container. Alternatively, it may be desirable to provide the components of the pharmaceutical formulation separately in two or more containers, e.g., one container for a siRNA compound preparation, and at least another for a carrier compound. The kit may be packaged in a number of different configurations such as one or more containers in a single box. The different components can be combined, e.g., according to instructions provided with the kit. The components can be combined according to a method described herein, e.g., to prepare and administer a pharmaceutical composition. The kit can also include a delivery device.

### IX. Methods for Inhibiting GSK3A Expression

[0774] The present disclosure also provides methods of inhibiting expression of a GSK3α gene in a cell. The methods include contacting a cell with an RNAi agent, e.g., double stranded RNAi agent, in an amount effective to inhibit expression of GSK3α in the cell, thereby inhibiting expression of GSK3α in the cell. In certain embodiments of the disclosure, GSK3α is inhibited in CNS (e.g., brain) cells. In some embodiments of the disclosure, GSK3α is inhibited in the liver (e.g., hepatocytes). In certain embodiments of the disclosure, GSK3α is inhibited in CNS (e.g., brain) cells and in liver (e.g., hepatocytes) cells.

[0775] Contacting of a cell with a RNAi agent, e.g., a double stranded RNAi agent, may be done in vitro or in vivo. Contacting a cell in vivo with the RNAi agent includes contacting a cell or group of cells within a subject, e.g., a human subject, with the RNAi agent. Combinations of in vitro and in vivo methods of contacting a cell are also possible.

[0776] Contacting a cell may be direct or indirect, as discussed above. Furthermore, contacting a cell may be accomplished via a targeting ligand, including any ligand described herein or known in the art. In some embodiments, the targeting ligand is a carbohydrate moiety, e.g., a GalNAc ligand, or any other ligand that directs the RNAi agent to a site of interest.

[0777] The term “inhibiting,” as used herein, is used interchangeably with “reducing,” “silencing,” “downregulating,” “suppressing” and other similar terms, and includes any level of inhibition. In certain embodiments, a level of inhibition, e.g., for an RNAi agent of the instant disclosure, can be assessed in cell culture conditions, e.g., wherein cells in cell culture are transfected via Lipofectamine™-mediated transfection at a concentration in the vicinity of a cell of 10 nM or less, 1 nM or less, etc. Knockdown of a given RNAi agent can be determined via comparison of pre-treated levels in cell culture versus post-treated levels in cell culture, optionally also comparing against cells treated in parallel with a scrambled or other form of control RNAi agent. Knockdown in cell culture of, e.g., 50% or more, can thereby be identified as indicative of “inhibiting” or “reducing”, “downregulating” or “suppressing”, etc. having occurred. It is expressly contemplated that assessment of targeted mRNA or encoded protein levels (and therefore an extent of “inhibiting”, etc. caused by a RNAi agent of the disclosure) can also be assessed in in vivo systems for the RNAi agents of the instant disclosure, under properly controlled conditions as described in the art.

[0778] The phrase “inhibiting expression of a GSK3α gene” or “inhibiting expression of GSK3α,” as used herein, includes inhibition of expression of any GSK3α gene (such as, e.g., a mouse GSK3α gene, a rat GSK3α gene, a monkey GSK3α gene, or a human GSK3α gene) as well as variants or mutants of a GSK3α gene that encode a GSK3α protein. Thus, the GSK3α gene may be a wild-type GSK3α gene, a mutant GSK3A gene, or a transgenic GSK3α gene in the context of a genetically manipulated cell, group of cells, or organism.

[0779] “Inhibiting expression of a GSK3α gene” includes any level of inhibition of a GSK3α gene, e.g., at least partial suppression of the expression of a GSK3α gene, such as an inhibition by at least 20%. In certain embodiments, inhibition is by at least 30%, at least 40%, at least 50%, at least about 60%, at least 70%, at least about 80%, at least 85%, at least 90%, at least 95%, at least 96%, at least 97%, at least 98%, or at least 99%; or to below the level of detection of the assay method. In certain method, inhibition is measured at a 10 nM concentration of the siRNA using the luciferase assay provided in Example 1.

[0780] The expression of a GSK3α gene may be assessed based on the level of any variable associated with GSK3α gene expression, e.g., GSK3α mRNA level or GSK3α protein level, or, for example, the level of neuroinflammation, e.g., microglial and astrocyte activation, and GSK3α deposition in areas of the brain associated with neuronal cell death.

[0781] Inhibition may be assessed by a decrease in an absolute or relative level of one or more of these variables compared with a control level. The control level may be any type of control level that is utilized in the art, e.g., a pre-dose baseline level, or a level determined from a similar subject, cell, or sample that is untreated or treated with a control (such as, e.g., buffer only control or inactive agent control).

[0782] In some embodiments of the methods of the disclosure, expression of a GSK3α gene is inhibited by at least 20%, 30%, 40%, such as, at least 50%, 60%, 70%, 80%, 85%, 90%, or 95%, or to below the level of detection of the assay. In certain embodiments, the methods include a clinically relevant inhibition of expression of GSK3α, e.g. as demonstrated by a clinically relevant outcome after treatment of a subject with an agent to reduce the expression of GSK3α.

[0783] Inhibition of the expression of a GSK3α gene may be manifested by a reduction of the amount of mRNA expressed by a first cell or group of cells (such cells may be present, for example, in a sample derived from a subject) in which a GSK3α gene is transcribed and which has or have been treated (e.g., by contacting the cell or cells with a RNAi agent of the disclosure, or by administering a RNAi agent of the disclosure to a subject in which the cells are or were present) such that the expression of a GSK3α gene is inhibited, as compared to a second cell or group of cells substantially identical to the first cell or group of cells but which has not or have not been so treated (control cell(s) not treated with a RNAi agent or not treated with a RNAi agent targeted to the gene of interest). The degree of inhibition may be expressed in terms of:

$$\frac{( mRNA in control cells ) - ( mRNA in treated cells )}{( mRNA in control cells )} \cdot 100 \%$$

[0784] In other embodiments, inhibition of the expression of a GSK3α gene may be assessed in terms of a reduction of a parameter that is functionally linked to a GSK3α gene expression, e.g., GSK3α protein expression. GSK3α gene silencing may be determined in any cell expressing GSK3α, either endogenous or heterologous from an expression construct, and by any assay known in the art.

[0785] Inhibition of the expression of a GSK3α protein may be manifested by a reduction in the level of the GSK3A protein that is expressed by a cell or group of cells (e.g., the level of protein expressed in a GSK3α derived from a subject). As explained above, for the assessment of mRNA suppression, the inhibition of protein expression levels in a treated cell or group of cells may similarly be expressed as a percentage of the level of protein in a control cell or group of cells.

[0786] A control cell or group of cells that may be used to assess the inhibition of the expression of a GSK3α gene includes a cell or group of cells that has not yet been contacted with an RNAi agent of the disclosure. For example, the control cell or group of cells may be derived from an individual subject (e.g., a human or animal subject) prior to treatment of the subject with an RNAi agent.

[0787] The level of GSK3α mRNA that is expressed by a cell or group of cells may be determined using any method known in the art for assessing mRNA expression. In one embodiment, the level of expression of GSK3α in a sample is determined by detecting a transcribed polynucleotide, or portion thereof, e.g., mRNA of the GSK3α gene. RNA may be extracted from cells using RNA extraction techniques including, for example, using acid phenol/guanidine isothiocyanate extraction (RNAzol B; Biogenesis), RNeasy™ RNA preparation kits (Qiagen®) or PAXgene (PreAnalytix, Switzerland). Typical assay formats utilizing ribonucleic acid hybridization include nuclear run-on assays, RT-PCR, RNase protection assays, northern blotting, in situ hybridization, and microarray analysis. Circulating GSK3α mRNA may be detected using methods the described in WO2012/177906, the entire contents of which are hereby incorporated herein by reference.

[0788] In some embodiments, the level of expression of GSK3α is determined using a nucleic acid probe. The term “probe”, as used herein, refers to any molecule that is capable of selectively binding to a specific GSK3α nucleic acid or protein, or fragment thereof. Probes can be synthesized by one of skill in the art, or derived from appropriate biological preparations. Probes may be specifically designed to be labeled. Examples of molecules that can be utilized as probes include, but are not limited to, RNA, DNA, proteins, antibodies, and organic molecules.

[0789] Isolated mRNA can be used in hybridization or amplification assays that include, but are not limited to, Southern or northern analyses, polymerase chain reaction (PCR) analyses and probe arrays. One method for the determination of mRNA levels involves contacting the isolated mRNA with a nucleic acid molecule (probe) that can hybridize to GSK3α mRNA. In one embodiment, the mRNA is immobilized on a solid surface and contacted with a probe, for example by running the isolated mRNA on an agarose gel and transferring the mRNA from the gel to a membrane, such as nitrocellulose. In an alternative embodiment, the probe(s) are immobilized on a solid surface and the mRNA is contacted with the probe(s), for example, in an Affymetrix® gene chip array. A skilled artisan can readily adapt known mRNA detection methods for use in determining the level of GSK3α mRNA.

[0790] An alternative method for determining the level of expression of GSK3α in a sample involves the process of nucleic acid amplification or reverse transcriptase (to prepare cDNA) of for example mRNA in the sample, e.g., by RT-PCR (the experimental embodiment set forth in Mullis, 1987, U.S. Pat. No. 4,683,202), ligase chain reaction (Barany (1991) Proc. Natl. Acad. Sci. USA 88:189-193), self sustained sequence replication (Guatelli et al. (1990) Proc. Natl. Acad. Sci. USA 87:1874-1878), transcriptional amplification system (Kwoh et al. (1989) Proc. Natl. Acad. Sci. USA 86:1173-1177), Q-Beta Replicase (Lizardi et al. (1988) Bio/Technology 6:1197), rolling circle replication (Lizardi et al., U.S. Pat. No. 5,854,033) or any other nucleic acid amplification method, followed by the detection of the amplified molecules using techniques well known to those of skill in the art. These detection schemes are especially useful for the detection of nucleic acid molecules if such molecules are present in very low numbers. In particular aspects of the disclosure, the level of expression of GSK3α is determined by quantitative fluorogenic RT-PCR (i.e., the TaqMan™ System), by a Dual-Glo® Luciferase assay, or by other art-recognized method for measurement of GSK3α expression or mRNA level.

[0791] The expression level of GSK3α mRNA may be monitored using a membrane blot (such as used in hybridization analysis such as northern, Southern, dot, and the like), or microwells, sample tubes, gels, beads or fibers (or any solid support comprising bound nucleic acids). See U.S. Pat. Nos. 5,770,722, 5,874,219, 5,744,305, 5,677,195 and 5,445,934, which are incorporated herein by reference. The determination of GSK3α expression level may also comprise using nucleic acid probes in solution.

[0792] In some embodiments, the level of mRNA expression is assessed using branched DNA (bDNA) assays or real time PCR (qPCR). The use of this PCR method is described and exemplified in the Examples presented herein. Such methods can also be used for the detection of GSK3α nucleic acids.

[0793] The level of GSK3α protein expression may be determined using any method known in the art for the measurement of protein levels. Such methods include, for example, electrophoresis, capillary electrophoresis, high performance liquid chromatography (HPLC), thin layer chromatography (TLC), hyperdiffusion chromatography, fluid or gel precipitin reactions, absorption spectroscopy, a colorimetric assays, spectrophotometric assays, flow cytometry, immunodiffusion (single or double), immunoelectrophoresis, western blotting, radioimmunoassay (RIA), enzyme-linked immunosorbent assays (ELISAs), immunofluorescent assays, electrochemiluminescence assays, and the like. Such assays can also be used for the detection of proteins indicative of the presence or replication of GSK3α proteins.

[0794] In some embodiments, the efficacy of the methods of the disclosure in the treatment of a GSK3α-related disease is assessed by a decrease in GSK3α mRNA level (e.g, by assessment of a CSF sample for GSK3α level, by brain biopsy, or otherwise).

[0795] In some embodiments, the efficacy of the methods of the disclosure in the treatment of a GSK3α-related disease is assessed by a decrease in GSK3α mRNA level (e.g, by assessment of a liver sample for GSK3α level, by biopsy, or otherwise).

[0796] In some embodiments of the methods of the disclosure, the RNAi agent is administered to a subject such that the RNAi agent is delivered to a specific site within the subject. The inhibition of expression of GSK3α may be assessed using measurements of the level or change in the level of GSK3α mRNA or GSK3α protein in a sample derived from a specific site within the subject, e.g., CNS cells. In certain embodiments, the methods include a clinically relevant inhibition of expression of GSK3α, e.g. as demonstrated by a clinically relevant outcome after treatment of a subject with an agent to reduce the expression of GSK3α.

[0797] As used herein, the terms detecting or determining a level of an analyte are understood to mean performing the steps to determine if a material, e.g., protein, RNA, is present. As used herein, methods of detecting or determining include detection or determination of an analyte level that is below the level of detection for the method used.

### X. Methods of Treating or Preventing GSK3A-Associated Neurodegenerative Diseases

[0798] The present disclosure also provides methods of using a RNAi agent of the disclosure or a composition containing a RNAi agent of the disclosure to reduce or inhibit GSK3α expression in a cell. The methods include contacting the cell with a dsRNA of the disclosure and maintaining the cell for a time sufficient to obtain degradation of the mRNA transcript of a GSK3α gene, thereby inhibiting expression of the GSK3α gene in the cell. Reduction in gene expression can be assessed by any methods known in the art. For example, a reduction in the expression of GSK3α may be determined by determining the mRNA expression level of GSK3α using methods routine to one of ordinary skill in the art, e.g., northern blotting, qRT-PCR; by determining the protein level of GSK3α using methods routine to one of ordinary skill in the art, such as western blotting, immunological techniques.

[0799] In the methods of the disclosure the cell may be contacted in vitro or in vivo, i.e., the cell may be within a subject.

[0800] A cell suitable for treatment using the methods of the disclosure may be any cell that expresses a GSK3α gene. A cell suitable for use in the methods of the disclosure may be a mammalian cell, e.g., a primate cell (such as a human cell or a non-human primate cell, e.g., a monkey cell or a chimpanzee cell), a non-primate cell (such as a rat cell, or a mouse cell. In one embodiment, the cell is a human cell, e.g., a human CNS cell. In one embodiment, the cell is a human cell, e.g., a human liver cell. In one embodiment, the cell is a human cell, e.g., a human CNS cell and a human liver cell.

[0801] GSK3α expression is inhibited in the cell by at least about 30, 40, 50, 55, 60, 65, 70, 75, 80, 85, 90, 95, 96, 97, 98, 99, or about 100%, i.e., to below the level of detection. In some embodiments, GSK3α expression is inhibited by at least 50%.

[0802] The in vivo methods of the disclosure may include administering to a subject a composition containing a RNAi agent, where the RNAi agent includes a nucleotide sequence that is complementary to at least a part of an RNA transcript of the GSK3α gene of the mammal to be treated. When the organism to be treated is a mammal such as a human, the composition can be administered by any means known in the art including, but not limited to oral, intraperitoneal, or parenteral routes, including intracranial (e.g., intraventricular (also referred to asintracerebroventricular), intraparenchymal, and intrathecal), intravenous, intramuscular, subcutaneous, transdermal, rectal, and topical (including buccal and sublingual) administration. In certain embodiments, the compositions are administered by intravenous infusion or injection. In certain embodiments, the compositions are administered by subcutaneous injection. In certain embodiments, the compositions are administered by intrathecal injection. In certain embodiments, the compositions are administered by intracerebroventricular injection.

[0803] In some embodiments, the administration is via a depot injection. A depot injection may release the RNAi agent in a consistent way over a prolonged time period. Thus, a depot injection may reduce the frequency of dosing needed to obtain a desired effect, e.g., a desired inhibition of GSK3α, or a therapeutic or prophylactic effect. A depot injection may also provide more consistent serum concentrations. Depot injections may include subcutaneous injections or intramuscular injections. In some embodiments, the depot injection is a subcutaneous injection.

[0804] In some embodiments, the administration is via a pump. The pump may be an external pump or a surgically implanted pump. In certain embodiments, the pump is a subcutaneously implanted osmotic pump. In other embodiments, the pump is an infusion pump. An infusion pump may be used for intracranial, intravenous, subcutaneous, arterial, or epidural infusions. In some embodiments, the infusion pump is a subcutaneous infusion pump. In other embodiments, the pump is a surgically implanted pump that delivers the RNAi agent to the CNS.

[0805] The mode of administration may be chosen based upon whether local or systemic treatment is desired and based upon the area to be treated. The route and site of administration may be chosen to enhance targeting.

[0806] In one aspect, the present disclosure also provides methods for inhibiting the expression of a GSK3α gene in a mammal. The methods include administering to the mammal a composition comprising a dsRNA that targets a GSK3α gene in a cell of the mammal and maintaining the mammal for a time sufficient to obtain degradation of the mRNA transcript of the GSK3α gene, thereby inhibiting expression of the GSK3α gene in the cell. Reduction in gene expression can be assessed by any methods known it the art and by methods, e.g. qRT-PCR, described herein. Reduction in protein production can be assessed by any methods known it the art and by methods, e.g. ELISA, described herein. In one embodiment, a CNS biopsy sample or a cerebrospinal fluid (CSF) sample serves as the tissue material for monitoring the reduction in GSK3α gene or protein expression (or of a proxy therefore).

[0807] The present disclosure further provides methods of treatment of a subject in need thereof. The treatment methods of the disclosure include administering an RNAi agent of the disclosure to a subject, e.g., a subject that would benefit from inhibition of GSK3α expression, in a therapeutically effective amount of a RNAi agent targeting a GSK3α gene or a pharmaceutical composition comprising a RNAi agent targeting a GSK3α gene.

[0808] In addition, the present disclosure provides methods of preventing, treating or inhibiting the progression of a GSK3α-associated neurodegenerative disease or disorder, such as fragile X syndrome (FXS).

[0809] The methods include administering to the subject a therapeutically effective amount of any of the RNAi agent, e.g., dsRNA agents, or the pharmaceutical composition provided herein, thereby preventing, treating, or inhibiting the progression of the GSK3α-associated neurodegenerative disease or disorder in the subject.

[0810] An RNAi agent of the disclosure may be administered as a “free RNAi agent.” A free RNAi agent is administered in the absence of a pharmaceutical composition. The naked RNAi agent may be in a suitable buffer solution. The buffer solution may comprise acetate, citrate, prolamine, carbonate, or phosphate, or any combination thereof. In one embodiment, the buffer solution is phosphate buffered saline (PBS). The pH and osmolarity of the buffer solution containing the RNAi agent can be adjusted such that it is suitable for administering to a subject.

[0811] Alternatively, an RNAi agent of the disclosure may be administered as a pharmaceutical composition, such as a dsRNA liposomal formulation.

[0812] Subjects that would benefit from a reduction or inhibition of GSK3α gene expression are those having a GSK3α-associated neurodegenerative disease.

[0813] The disclosure further provides methods for the use of a RNAi agent or a pharmaceutical composition thereof, e.g., for treating a subject that would benefit from reduction or inhibition of GSK3α expression, e.g., a subject having a GSK3α-associated neurodegenerative disorder, in combination with other pharmaceuticals or other therapeutic methods, e.g., with known pharmaceuticals or known therapeutic methods, such as, for example, those which are currently employed for treating these disorders. For example, in certain embodiments, an RNAi agent targeting GSK3α is administered in combination with, e.g., an agent useful in treating a GSK3α-associated neurodegenerative disorder as described elsewhere herein or as otherwise known in the art. For example, additional agents and treatments suitable for treating a subject that would benefit from reducton in GSK3α expression, e.g., a subject having a GSK3α-associated neurodegenerative disorder, may include agents currently used to treat symptoms of GSK3α. The RNAi agent and additional therapeutic agents may be administered at the same time or in the same combination, e.g., intrathecally, or the additional therapeutic agent can be administered as part of a separate composition or at separate times or by another method known in the art or described herein. The RNAi agent and additional therapeutic agents may be administered at the same time or in the same combination or the additional therapeutic agent can be administered as part of a separate composition or at separate times or by another method known in the art or described herein.

[0814] Exemplary additional therapeutics and treatments include, for example, sedatives, antidepressants, clonazepam, sodium valproate, opiates, antiepileptic drugs, cholinesterase inhibitors, memantine, benzodiazepines, levodopa, COMT inhibitors (e.g., tolcapone and entacapone), dopamine agonists (e.g., bromocriptine, pergolide, pramipexole, ropinirole, piribedil, cabergoline, apomorphine and lisuride), MAO-B inhibitors (e.g., safinamide, selegiline and rasagiline), amantadine, an anticholinergic, modafinil, pimavanserin, doxepin, rasagline, an antipsychotic, an atypical anrtipsychotic (e.g., amisulpride, olanzapine, risperidone, and clozapine), riluzole, edaravone, deep brain stimulation, non-invasive ventilation (NIV), invasive ventilation physical therapy, occupational therapy, speech therapy, dietary changes and swallowing technique a feeding tube, a PEG tube, probiotics, and psychological therapy.

[0815] In one embodiment, the method includes administering a composition featured herein such that expression of the target GSK3α gene is decreased, for at least one month. In some embodiments, expression is decreased for at least 2 months, or 6 months.

[0816] In one embodiment, the RNAi agents useful for the methods and compositions featured herein specifically target RNAs (primary or processed) of the target GSK3α gene. Compositions and methods for inhibiting the expression of these genes using RNAi agents can be prepared and performed as described herein.

[0817] Administration of the dsRNA according to the methods of the disclosure may result in a reduction of the severity, signs, symptoms, or markers of such diseases or disorders in a patient with a GSK3α-associated neurodegenerative disorder. By “reduction” in this context is meant a statistically significant or clinically significant decrease in such level. The reduction can be, for example, at least 5%, 10%, 15%, 20%, 25%, 30%, 35%, 40%, 45%, 50%, 55%, 60%, 65%, 70%, 75%, 80%, 85%, 90%, 95%, or about 100%.

[0818] Efficacy of treatment or prevention of disease can be assessed, for example by measuring disease progression, disease remission, symptom severity, reduction in pain, quality of life, dose of a medication required to sustain a treatment effect, level of a disease marker or any other measurable parameter appropriate for a given disease being treated or targeted for prevention. It is well within the ability of one skilled in the art to monitor efficacy of treatment or prevention by measuring any one of such parameters, or any combination of parameters. For example, efficacy of treatment of a GSK3α-associated neurodegenerative disorder may be assessed, for example, by periodic monitoring of a subject's cognition, learning, or memory. Comparisons of the later readings with the initial readings provide a physician an indication of whether the treatment is effective. It is well within the ability of one skilled in the art to monitor efficacy of treatment or prevention by measuring any one of such parameters, or any combination of parameters. In connection with the administration of a RNAi agent targeting GSK3α or pharmaceutical composition thereof, “effective against” a GSK3α-associated neurodegenerative disorder indicates that administration in a clinically appropriate manner results in a beneficial effect for at least a statistically significant fraction of patients, such as an improvement of symptoms, a cure, a reduction in disease, extension of life, improvement in quality of life, or other effect generally recognized as positive by medical doctors familiar with treating GSK3α-associated neurodegenerative disorders and the related causes.

[0819] A treatment or preventive effect is evident when there is a statistically significant improvement in one or more parameters of disease status, or by a failure to worsen or to develop symptoms where they would otherwise be anticipated. As an example, a favorable change of at least 10% in a measurable parameter of disease, such as at least 20%, 30%, 40%, 50%, or more can be indicative of effective treatment. Efficacy for a given RNAi agent drug or formulation of that drug can also be judged using an experimental animal model for the given disease as known in the art. When using an experimental animal model, efficacy of treatment is evidenced when a statistically significant reduction in a marker or symptom is observed.

[0820] Alternatively, the efficacy can be measured by a reduction in the severity of disease as determined by one skilled in the art of diagnosis based on a clinically accepted disease severity grading scale. Any positive change resulting in e.g., lessening of severity of disease measured using the appropriate scale, represents adequate treatment using a RNAi agent or RNAi agent formulation as described herein.

[0821] Subjects can be administered a therapeutic amount of dsRNA, such as about 0.01 mg/kg to about 200 mg/kg.

[0822] The RNAi agent can be administered intrathecally, intraventricularly, or by intravenous infusion over a period of time, on a regular basis. In certain embodiments, after an initial treatment regimen, the treatments can be administered on a less frequent basis. Administration of the RNAi agent can reduce GSK3α levels, e.g., in a cell, tissue, blood, CSF sample or other compartment of the patient by at least 20%, 30%, 40%, 50%, 55%, 60%, 65%, 70,% 75%, 80%, 85%, 90%, 95%, 96%, 97%, 98%, or at least about 99% or more. In one embodiment, administration of the RNAi agent can reduce GSK3α levels, e.g., in a cell, tissue, blood, CSF sample or other compartment of the patient by at least 50%.

[0823] Before administration of a full dose of the RNAi agent, patients can be administered a smaller dose, such as a 5% infusion reaction, and monitored for adverse effects, such as an allergic reaction. In another example, the patient can be monitored for unwanted immunostimulatory effects, such as increased cytokine (e.g., TNF-alpha or INF-alpha) levels.

[0824] Alternatively, the RNAi agent can be administered subcutaneously, i.e., by subcutaneous injection.

[0825] One or more injections may be used to deliver the desired, e.g., monthly dose of RNAi agent to a subject. The injections may be repeated over a period of time. The administration may be repeated on a regular basis. In certain embodiments, after an initial treatment regimen, the treatments can be administered on a less frequent basis. A repeat-dose regimine may include administration of a therapeutic amount of RNAi agent on a regular basis, such as monthly or extending to once a quarter, twice per year, once per year. In certain embodiments, the RNAi agent is administered about once per month to about once per quarter (i.e., about once every three months).

[0826] Unless otherwise defined, all technical and scientific terms used herein have the same meaning as commonly understood by one of ordinary skill in the art to which this invention belongs. Although methods and materials similar or equivalent to those described herein can be used in the practice or testing of the RNAi agents and methods featured in the invention, suitable methods and materials are described below. All publications, patent applications, patents, and other references mentioned herein are incorporated by reference in their entirety. In case of conflict, the present specification, including definitions, will control. In addition, the materials, methods, and examples are illustrative only and not intended to be limiting.

[0827] An informal Sequence Listing is filed herewith and forms part of the specification as filed.

### EXAMPLES

### Example 1. RNAi Agent Design, Synthesis, Selection, and In Vitro Evaluation

[0828] This Example describes methods for the design, synthesis, selection, and in vitro evaluation of GSK3α RNAi agents.

### Source of Reagents

[0829] Where the source of a reagent is not specifically given herein, such reagent can be obtained from any supplier of reagents for molecular biology at a quality/purity standard for application in molecular biology.

### Bioinformatics

[0830] siRNAs targeting the mouse GSK3α gene (refseqID NM_001031667.1; NCBI GeneID: 20655) were designed using custom R and Python scripts. The mouse NM_001031667.1 REFSEQ mRNA has a length of 2276 bases.

[0831] Detailed lists of the unmodified GSK3α sense and antisense strand nucleotide sequences are shown in Tables 2 and 4. Detailed lists of the modified GSK3α sense and antisense strand nucleotide sequences are shown in Tables 3 and 5.

[0832] It is to be understood that, throughout the application, a duplex name without a decimal is equivalent to a duplex name with a decimal which merely references the batch number of the duplex. For example, AD-266859 is equivalent to AD-266859.1.

siRNA Synthesis

[0833] Briefly, siRNA sequences were synthesized on a 1 μmol scale using a Mermade 192 synthesizer (BioAutomation) with phosphoramidite chemistry on solid supports. The solid support was controlled pore glass (500-1000 Å) loaded with a custom GalNAc ligand (3′-GalNAc conjugates), universal solid support (AM Chemicals), or the first nucleotide of interest. Ancillary synthesis reagents and standard 2-cyanoethyl phosphoramidite monomers (2′-deoxy-2′-fluoro, 2′-O-methyl, RNA, DNA) were obtained from Thermo-Fisher (Milwaukee, WI), Hongene (China), or Chemgenes (Wilmington, MA, USA). Additional phosphoramidite monomers were procured from commercial suppliers, prepared in-house, or procured using custom synthesis from various CMOs. Phosphoramidites were prepared at a concentration of 100 mM in either acetonitrile or 9:1 acetonitrile:DMF and were coupled using 5-Ethylthio-1H-tetrazole (ETT, 0.25 M in acetonitrile) with a reaction time of 400 s. Phosphorothioate linkages were generated using a 100 mM solution of 3-((Dimethylamino-methylidene) amino)-3H-1,2,4-dithiazole-3-thione (DDTT, obtained from Chemgenes (Wilmington, MA, USA)) in anhydrous acetonitrile/pyridine (9:1 v/v). Oxidation time was 5 minutes. All sequences were synthesized with final removal of the DMT group (“DMT-Off”).

[0834] Upon completion of the solid phase synthesis, solid-supported oligoribonucleotides were treated with 300 μL of Methylamine (40% aqueous) at room temperature in 96 well plates for approximately 2 hours to afford cleavage from the solid support and subsequent removal of all additional base-labile protecting groups. For sequences containing any natural ribonucleotide linkages (2′-OH) protected with a tert-butyl dimethyl silyl (TBDMS) group, a second deprotection step was performed using TEA.3HF (triethylamine trihydrofluoride). To each oligonucleotide solution in aqueous methylamine was added 200 μL of dimethyl sulfoxide (DMSO) and 300 μL TEA.3HF and the solution was incubated for approximately 30 mins at 60° C. After incubation, the plate was allowed to come to room temperature and crude oligonucleotides were precipitated by the addition of 1 mL of 9:1 acetontrile:ethanol or 1:1 ethanol:isopropanol. The plates were then centrifuged at 4° C. for 45 mins and the supernatant carefully decanted with the aid of a multichannel pipette. The oligonucleotide pellet was resuspended in 20 mM NaOAc and subsequently desalted using a HiTrap size exclusion column (5 mL, GE Healthcare) on an Agilent LC system equipped with an autosampler, UV detector, conductivity meter, and fraction collector. Desalted samples were collected in 96 well plates and then analyzed by LC-MS and UV spectrometry to confirm identity and quantify the amount of material, respectively.

[0835] Duplexing of single strands was performed on a Tecan liquid handling robot. Sense and antisense single strands were combined in an equimolar ratio to a final concentration of 10 μM in 1×PBS in 96 well plates, the plate sealed, incubated at 100° C. for 10 minutes, and subsequently allowed to return slowly to room temperature over a period of 2-3 hours. The concentration and identity of each duplex was confirmed and then subsequently utilized for in vitro screening assays.

### Cell Culture and Transfections

[0836] Cells were transfected by adding 4.9 μL of Opti-MEM plus 0.1 μL of RNAiMAX per well (Invitrogen, Carlsbad CA. cat #13778-150) to 5 μL of siRNA duplexes per well, with 4 replicates of each siRNA duplex, into a 384-well plate, and incubated at room temperature for 15 minutes. Forty μL of MEDIA containing ˜5×10³ cells were then added to the siRNA mixture. Cells were incubated for 24 hours prior to RNA purification. Experiments were performed at 10 nM, 1 nM and 0.1 nM in Neuro2A cells

Total RNA Isolation Using DYNABEADS mRNA Isolation Kit

[0837] RNA was isolated using an automated protocol on a BioTek-EL406 platform using DYNABEADs (Invitrogen, cat #61012). Briefly, 70 μL of Lysis/Binding Buffer and 10 μL of lysis buffer containing 3 μL of magnetic beads were added to the plate with cells. Plates were incubated on an electromagnetic shaker for 10 minutes at room temperature and then magnetic beads were captured and the supernatant was removed. Bead-bound RNA were then washed 2 times with 150 μL Wash Buffer A and once with Wash Buffer B. Beads are then washed with 150 μL Elution Buffer, re-captured and supernatant removed.

cDNA Synthesis Using ABI High Capacity cDNA Reverse Transcription Kit (Applied Biosystems, Foster City, CA, Cat #4368813)

[0838] Ten μL of a master mix containing 1 μL 10× Buffer, 0.4 μL 25× dNTPs, 1 μL 10× Random primers, 0.5 μL Reverse Transcriptase, 0.5 μL RNase inhibitor and 6.6 μL of H₂O per reaction was added to RNA isolated above. Plates were sealed, mixed, and incubated on an electromagnetic shaker for 10 minutes at room temperature, followed by 2 hour incubation at 37° C.

### Real Time PCR

[0839] Two μL of cDNA were added to a master mix containing 0.5 μL of human or mouse GAPDH TaqMan Probe (ThermoFisher cat 4352934E or 4351309) and 0.5 μL of appropriate GSK3α probe (commercially available, e.g., from Thermo Fisher) and 5 μL Lightcycler 480 probe master mix (Roche Cat #04887301001) per well in a 384 well plates (Roche cat #04887301001). Real time PCR was done in a LightCycler480 Real Time PCR system (Roche). Each duplex was tested with N=4 and data were normalized to cells transfected with a non-targeting control siRNA. To calculate relative fold change, real time data were analyzed using the ΔΔCt method and normalized to assays performed with cells transfected with a non-targeting control siRNA.

[0840] The results of single dose screens in Neuro2A cells of the duplexes listed in Tables 2 and 3 are provided in Table 6.

TABLE 1
Abbreviations of nucleotide monomers used in nucleic acid sequence representation. It will be
understood that these monomers, when present in an oligonucleotide, are mutually linked by 5′-3′-
phosphodiester bonds; and it is understood that when the nucleotide contains a 2′-fluoro modification,
then the fluoro replaces the hydroxy at that position in the parent nucleotide (i.e., it is a 2′-deoxy-2′-
fluoronucleotide).

| Abbrevi- | |
|---|---|
| ation | Nucleotide(s) |
| A | Adenosine-3′-phosphate |
| Ab | beta-L-adenosine-3′-phosphate |
| Abs | beta-L-adenosine-3′-phosphorothioate |
| Af | 2′-fluoroadenosine-3′-phosphate |
| Afs | 2′-fluoroadenosine-3′-phosphorothioate |
| As | adenosine-3′-phosphorothioate |
| C | cytidine-3′-phosphate |
| Cb | beta-L-cytidine-3′-phophate |
| Cbs | beta-L-cytidine-3′-phosphorothioate |
| Cf | 2′-fluorocytidine-3′-phosphate |
| Cfs | 2′-fluorocytidine-3′-phosphorothioate |
| Cs | cytidine-3′-phosphorothioate |
| G | guanosine-3′-phosphate |
| Gb | beta-L-guanosine-3′-phosphate |
| Gbs | beta-L-guanosine-3′-phosphorothioate |
| Gf | 2′-fluoroguanosine-3′-phosphate |
| Gfs | 2′-fluoroguanosine-3′-phosphorothioate |
| Gs | guanosine-3′-phosphorothioate |
| T | 5′-methyluridine-3′-phosphate |
| Tf | 2′-fluoro-5-methyluridine-3′-phosphate |
| Tfs | 2′-fluoro-5-methyluridine-3′-phosphorothioate |
| Ts | 5-methyluridine-3′-phosphorothioate |
| U | Uridine-3′-phosphate |
| Uf | 2′-fluorouridine-3′-phosphate |
| Ufs | 2′-fluorouridine-3′-phosphorothioate |
| Us | uridine-3′-phosphorothioate |
| N | any nucleotide, modified or unmodified |
| a | 2′-O-methyladenosine-3′-phosphate |
| as | 2′-O-methyladenosine-3′-phosphorothioate |
| c | 2′-O-methylcytidine-3′-phosphate |
| cs | 2′-O-methylcytidine-3′-phosphorothioate |
| g | 2′-O-methylguanosine-3′-phosphate |
| gs | 2′-O-methylguanosine-3′-phosphorothioate |
| t | 2′-O-methyl-5-methyluridine-3′-phosphate |
| ts | 2′-O-methyl-5-methyluridine-3′-phosphorothioate |
| u | 2′-O-methyluridine-3′-phosphate |
| us | 2′-O-methyluridine-3′-phosphorothioate |
| s | phosphorothioate linkage |
| L96 | N-[tris(GalNAc-alkyl)-amidodecanoyl)]-4-hydroxyprolinol |
| | (Hyp-(GalNAc-alkyl)3) |
| | [chemical structure] |
| Y34 | 2-hydroxymethyl-tetrahydrofurane-4-methoxy-3-phosphate (abasic 2′-OMe |
| | furanose) |
| | [chemical structure] |
| Y44 | inverted abasic DNA (2-hydroxymethyl-tetrahydrofurane-5-phosphate |
| | [chemical structure] |
| L10 | N-(cholesterylcarboxamidocaproyl)-4-hydroxyprolinol (Hyp-C6-Chol) |
| | [chemical structure] |
| (Agn) | Adenosine-glycol nucleic acid (GNA) S-Isomer |
| (Cgn) | Cytidine-glycol nucleic acid (GNA) S-Isomer |
| (Gyn) | Guanosine-glycol nucleic acid (GNA) S-Isomer |
| (Tgn) | Thymidine-glycol nucleic acid (GNA) S-Isomer |
| P | Phosphate |
| VP | Vinyl-phosphonate |
| dA | 2′-deoxyadenosine-3′-phosphate |
| dAs | 2′-deoxyadenosine-3′-phosphorothioate |
| dC | 2′-deoxycytidine-3′-phosphate |
| dCs | 2′-deoxycytidine-3′-phosphorothioate |
| dG | 2′-deoxyguanosine-3′-phosphate |
| dGs | 2′-deoxyguanosine-3′-phosphorothioate |
| dT | 2′-deoxythymidine-3′-phosphate |
| dTs | 2′-deoxythymidine-3′-phosphorothioate |
| dU | 2′-deoxyuridine |
| dUs | 2′-deoxyuridine-3′-phosphorothioate |
| (C2p) | cytidine-2′-phosphate |
| (G2p) | guanosine-2′-phosphate |
| (U2p) | uridine-2′-phosphate |
| (A2p) | adenosine-2′-phosphate |
| (Ahd) | 2′-O-hexadecyl-adenosine-3′-phosphate |
| (Ahds) | 2′-O-hexadecyl-adenosine-3′-phosphorothioate |
| (Chd) | 2′-O-hexadecyl-cytidine-3′-phosphate |
| (Chds) | 2′-O-hexadecyl-cytidine-3′-phosphorothioate |
| (Ghd) | 2′-hexadecyl-guanosine-3′-phosphate |
| (Ghds) | 2′-O-hexadecyl-guanosine-3′-phosphorothioate |
| (Uhd) | 2′-O-hexadecyl-uridine-3′-phosphate |
| (Uhds) | 2′-O-hexadecyl-uridine-3′-phosphorothioate |
| s | phosphorothioate |

TABLE 2
Unmodified Sense and Antisense Strand Sequences of
Glycogen Synthase Kinase 3 alpha dsRNA Agents

| | Sense | SEQ | Range in | Antisense | SEQ | Range in |
|---|---|---|---|---|---|---|
| Duplex | Sequence | ID | NM_0010 | Sequence | ID | NM_0010 |
| Name | 5′ to 3′ | NO | 31667.1 | 5′ to 3′ | NO | 31667.1 |
| AD-1190533.1 | CUUACACUGACAUCAAAGUGA | 13 | 544-564 | UCACUUUGAUGUCAGUGUAAGCC | 57 | 542-564 |
| AD-1190540.1 | UGACAUCAAAGUGAUUGGUAA | 14 | 551-571 | UUACCAAUCACUUUGAUGUCAGU | 58 | 549-571 |
| AD-1190617.1 | CCAUCAAGAAGGUUCUUCAGA | 15 | 628-648 | UCUGAAGAACCUUCUUGAUGGCC | 59 | 626-648 |
| AD-1190626.1 | AGGUUCUUCAGGACAAAAGGA | 16 | 637-657 | UCCUUUUGUCCUGAAGAACCUUC | 60 | 635-657 |
| AD-1190627.1 | GGUUCUUCAGGACAAAAGGUA | 17 | 638-658 | UACCUUUUGUCCUGAAGAACCUU | 61 | 636-658 |
| AD-1190628.1 | GUUCUUCAGGACAAAAGGUUA | 18 | 639-659 | UAACCUUUUGUCCUGAAGAACCU | 62 | 637-659 |
| AD-1190657.1 | AGAACUGCAGAUUAUGCGUAA | 19 | 668-688 | UUACGCAUAAUCUGCAGUUCUCG | 63 | 666-688 |
| AD-1190662.1 | UGCAGAUUAUGCGUAAGCUGA | 20 | 673-693 | UCAGCUUACGCAUAAUCUGCAGU | 64 | 671-693 |
| AD-1190793.1 | UAUCAUCUACAUCAAGGUGUA | 21 | 842-862 | UACACCUUGAUGUAGAUGAUAGG | 65 | 840-862 |
| AD-1190893.1 | UGUCCUCAAGCUCUGCGAUUA | 22 | 962-982 | UAAUCGCAGAGCUUGAGGACAGC | 66 | 960-982 |
| AD-1190897.1 | CUCAAGCUCUGCGAUUUUGGA | 23 | 966-986 | UCCAAAAUCGCAGAGCUUGAGGA | 67 | 964-986 |
| AD-1190898.1 | UCAAGCUCUGCGAUUUUGGCA | 24 | 967-987 | UGCCAAAAUCGCAGAGCUUGAGG | 68 | 965-987 |
| AD-1190899.1 | CAAGCUCUGCGAUUUUGGCAA | 25 | 968-988 | UUGCCAAAAUCGCAGAGCUUGAG | 69 | 966-988 |
| AD-1190900.1 | AAGCUCUGCGAUUUUGGCAGA | 26 | 969-989 | UCUGCCAAAAUCGCAGAGCUUGA | 70 | 967-989 |
| AD-1190925.1 | CCCAAUGUGUCCUACAUCUGA | 27 | 1014-1034 | UCAGAUGUAGGACACAUUGGGCU | 71 | 1012-1034 |
| AD-1190960.1 | UGCUCCAGAACUCAUCUUUGA | 28 | 1049-1069 | UCAAAGAUGAGUUCUGGAGCACG | 72 | 1047-1069 |
| AD-1190961.1 | GCUCCAGAACUCAUCUUUGGA | 29 | 1050-1070 | UCCAAAGAUGAGUUCUGGAGCAC | 73 | 1048-1070 |
| AD-1190962.1 | CUCCAGAACUCAUCUUUGGAA | 30 | 1051-1071 | UUCCAAAGAUGAGUUCUGGAGCA | 74 | 1049-1071 |
| AD-1190963.1 | UCCAGAACUCAUCUUUGGAGA | 31 | 1052-1072 | UCUCCAAAGAUGAGUUCUGGAGC | 75 | 1050-1072 |
| AD-1190964.1 | CCAGAACUCAUCUUUGGAGCA | 32 | 1053-1073 | UGCUCCAAAGAUGAGUUCUGGAG | 76 | 1051-1073 |
| AD-1191109.1 | GAGAGAUGAACCCUAACUAUA | 33 | 1225-1245 | UAUAGUUAGGGUUCAUCUCUCGG | 77 | 1223-1245 |
| AD-1191146.1 | GACAAAGGUGUUCAAAUCUUA | 34 | 1283-1303 | UAAGAUUUGAACACCUUUGUCCA | 78 | 1281-1303 |
| AD-1191232.1 | GCCCACAGCUUCUUCGAUGAA | 35 | 1389-1409 | UUCAUCGAAGAAGCUGUGGGCAC | 79 | 1387-1409 |
| AD-1191238.1 | AGCUUCUUCGAUGAACUGCGA | 36 | 1395-1415 | UCGCAGUUCAUCGAAGAAGCUGU | 80 | 1393-1415 |
| AD-1191336.1 | CCAUCCUCACAAGCUUUAACA | 37 | 1575-1595 | UGUUAAAGCUUGUGAGGAUGGGU | 81 | 1573-1595 |
| AD-1191337.1 | CAUCCUCACAAGCUUUAACUA | 38 | 1576-1596 | UAGUUAAAGCUUGUGAGGAUGGG | 82 | 1574-1596 |
| AD-1191338.1 | AUCCUCACAAGCUUUAACUGA | 39 | 1577-1597 | UCAGUUAAAGCUUGUGAGGAUGG | 83 | 1575-1597 |
| AD-1191508.1 | AAGAGGAUUUUAACUGUUUGA | 40 | 1845-1865 | UCAAACAGUUAAAAUCCUCUUUA | 84 | 1843-1865 |
| AD-1191509.1 | AGAGGAUUUUAACUGUUUGUA | 41 | 1846-1866 | UACAAACAGUUAAAAUCCUCUUU | 85 | 1844-1866 |
| AD-1191510.1 | GAGGAUUUUAACUGUUUGUAA | 42 | 1847-1867 | UUACAAACAGUUAAAAUCCUCUU | 86 | 1845-1867 |
| AD-1191558.1 | UGGGUGUAAAUAGAUUGUUAA | 43 | 2033-2053 | UUAACAAUCUAUUUACACCCAGG | 87 | 2031-2053 |
| AD-1191559.1 | GGGUGUAAAUAGAUUGUUAUA | 44 | 2034-2054 | UAUAACAAUCUAUUUACACCCAG | 88 | 2032-2054 |
| AD-1191578.1 | AAUUCACACCAUUCAACUUGA | 45 | 2077-2097 | UCAAGUUGAAUGGUGUGAAUUGA | 89 | 2075-2097 |
| AD-1191612.1 | GUCCCUGGUGUCUUAGUUUCA | 46 | 2180-2200 | UGAAACUAAGACACCAGGGACUC | 90 | 2178-2200 |
| AD-1191621.1 | GUCUUAGUUUCCACAGUAAGA | 47 | 2189-2209 | UCUUACUGUGGAAACUAAGACAC | 91 | 2187-2209 |
| AD-1191622.1 | UCUUAGUUUCCACAGUAAGGA | 48 | 2190-2210 | UCCUUACUGUGGAAACUAAGACA | 92 | 2188-2210 |
| AD-1191624.1 | UUAGUUUCCACAGUAAGGUUA | 49 | 2192-2212 | UAACCUUACUGUGGAAACUAAGA | 93 | 2190-2212 |
| AD-1191655.1 | AGACCUCUGUUCAAUAAAUUA | 50 | 2223-2243 | UAAUUUAUUGAACAGAGGUCUGU | 94 | 2221-2243 |
| AD-1191657.1 | ACCUCUGUUCAAUAAAUUAUA | 51 | 2225-2245 | UAUAAUUUAUUGAACAGAGGUCU | 95 | 2223-2245 |
| AD-1191658.1 | CUCUGUUCAAUAAAUUAUUGA | 52 | 2227-2247 | UCAAUAAUUUAUUGAACAGAGGU | 96 | 2225-2247 |
| AD-1191659.1 | UCUGUUCAAUAAAUUAUUGGA | 53 | 2228-2248 | UCCAAUAAUUUAUUGAACAGAGG | 97 | 2226-2248 |
| AD-1191660.1 | CUGUUCAAUAAAUUAUUGGCA | 54 | 2229-2249 | UGCCAAUAAUUUAUUGAACAGAG | 98 | 2227-2249 |
| AD-1191661.1 | UGUUCAAUAAAUUAUUGGCAA | 55 | 2230-2250 | UUGCCAAUAAUUUAUUGAACAGA | 99 | 2228-2250 |
| AD-1191663.1 | UUCAAUAAAUUAUUGGCAUGA | 56 | 2232-2252 | UCAUGCCAAUAAUUUAUUGAACA | 100 | 2230-2252 |

TABLE 3
Modified Sense and Antisense Strand Sequences of Glycogen Synthase Kinase 3 alpha dsRNA Agents

| | | SEQ | | SEQ |
|---|---|---|---|---|
| Duplex | | ID | | ID |
| Name | Sense Sequence 5′ to 3′ | NO: | Antisense Sequence 5′ to 3′ | NO: |
| AD- | csusuac(Ahd)CfuGfAfCfaucaaagugaL96 | 101 | VPusCfsacuUfuGfAfugucAfgUfguaagsc | 145 |
| 1190533.1 | | | sc | |
| AD- | usgsaca(Uhd)CfaAfAfGfugauugguaaL96 | 102 | VPusUfsaccAfaUfCfacuuUfgAfugucasg | 146 |
| 1190540.1 | | | su | |
| AD- | cscsauc(Ahd)AfgAfAfGfguucuucagaL96 | 103 | VPusCfsugaAfgAfAfccuuCfuUfgauggsc | 147 |
| 1190617.1 | | | sc | |
| AD- | asgsguu(Chd)UfuCfAfGfgacaaaaggaL96 | 104 | VPusCfscuuUfuGfUfccugAfaGfaaccusu | 148 |
| 1190626.1 | | | sc | |
| AD- | gsgsuuc(Uhd)UfcAfGfGfacaaaagguaL96 | 105 | VPusAfsccuUfuUfGfuccuGfaAfgaaccsu | 149 |
| 1190627.1 | | | su | |
| AD- | gsusucu(Uhd)CfaGfGfAfcaaaagguuaL96 | 106 | VPusAfsaccUfuUfUfguccUfgAfagaacsc | 150 |
| 1190628.1 | | | su | |
| AD- | asgsaac(Uhd)GfcAfGfAfuuaugcguaaL96 | 107 | VPusUfsacgCfaUfAfaucuGfcAfguucusc | 151 |
| 1190657.1 | | | sg | |
| AD- | usgscag(Ahd)UfuAfUfGfcguaagcugaL96 | 108 | VPusCfsagcUfuAfCfgcauAfaUfcugcasg | 152 |
| 1190662.1 | | | su | |
| AD- | usasuca(Uhd)CfuAfCfAfucaagguguaL96 | 109 | VPusAfscacCfuUfGfauguAfgAfugauasg | 153 |
| 1190793.1 | | | sg | |
| AD- | usgsucc(Uhd)CfaAfGfCfucugcgauuaL96 | 110 | VPusAfsaucGfcAfGfagcuUfgAfggacasg | 154 |
| 1190893.1 | | | sc | |
| AD- | csuscaa(Ghd)CfuCfUfGfcgauuuuggaL96 | 111 | VPusCfscaaAfaUfCfgcagAfgCfuugagsg | 155 |
| 1190897.1 | | | sa | |
| AD- | uscsaag(Chd)UfcUfGfCfgauuuuggcaL96 | 112 | VPusGfsccaAfaAfUfcgcaGfaGfcuugasg | 156 |
| 1190898.1 | | | sg | |
| AD- | csasagc(Uhd)CfuGfCfGfauuuuggcaaL96 | 113 | VPusUfsgccAfaAfAfucgcAfgAfgcuugsa | 157 |
| 1190899.1 | | | sg | |
| AD- | asasgcu(Chd)UfgCfGfAfuuuuggcagaL96 | 114 | VPusCfsugcCfaAfAfaucgCfaGfagcuusg | 158 |
| 1190900.1 | | | sa | |
| AD- | cscscaa(Uhd)GfuGfUfCfcuacaucugaL96 | 115 | VPusCfsagaUfgUfAfggacAfcAfuugggsc | 159 |
| 1190925.1 | | | su | |
| AD- | usgscuc(Chd)AfgAfAfCfucaucuuugaL96 | 116 | VPusCfsaaaGfaUfGfaguuCfuGfgagcasc | 160 |
| 1190960.1 | | | sg | |
| AD- | gscsucc(Ahd)GfaAfCfUfcaucuuuggaL96 | 117 | VPusCfscaaAfgAfUfgaguUfcUfggagcsa | 161 |
| 1190961.1 | | | sc | |
| AD- | csuscca(Ghd)AfaCfUfCfaucuuuggaaL96 | 118 | VPusUfsccaAfaGfAfugagUfuCfuggagsc | 162 |
| 1190962.1 | | | sa | |
| AD- | uscscag(Ahd)AfcUfCfAfucuuuggagaL96 | 119 | VPusCfsuccAfaAfGfaugaGfuUfcuggasg | 163 |
| 1190963.1 | | | sc | |
| AD- | cscsaga(Ahd)CfuCfAfUfcuuuggagcaL96 | 120 | VPusGfscucCfaAfAfgaugAfgUfucuggsa | 164 |
| 1190964.1 | | | sg | |
| AD- | gsasgag(Ahd)UfgAfAfCfccuaacuauaL96 | 121 | VPusAfsuagUfuAfGfgguuCfaUfcucucsg | 165 |
| 1191109.1 | | | sg | |
| AD- | gsascaa(Ahd)GfgUfGfUfucaaaucuuaL96 | 122 | VPusAfsagaUfuUfGfaacaCfcUfuugucsc | 166 |
| 1191146.1 | | | sa | |
| AD- | gscscca(Chd)AfgCfUfUfcuucgaugaaL96 | 123 | VPusUfscauCfgAfAfgaagCfuGfugggcsa | 167 |
| 1191232.1 | | | sc | |
| AD- | asgscuu(Chd)UfuCfGfAfugaacugcgaL96 | 124 | VPusCfsgcaGfuUfCfaucgAfaGfaagcusg | 168 |
| 1191238.1 | | | su | |
| AD- | cscsauc(Chd)UfcAfCfAfagcuuuaacaL96 | 125 | VPusGfsuuaAfaGfCfuuguGfaGfgauggs | 169 |
| 1191336.1 | | | gsu | |
| AD- | csasucc(Uhd)CfaCfAfAfgcuuuaacuaL96 | 126 | VPusAfsguuAfaAfGfcuugUfgAfggaugs | 170 |
| 1191337.1 | | | gsg | |
| AD- | asusccu(Chd)AfcAfAfGfcuuuaacugaL96 | 127 | VPusCfsaguUfaAfAfgcuuGfuGfaggausg | 171 |
| 1191338.1 | | | sg | |
| AD- | asasgag(Ghd)AfuUfUfUfaacuguuugaL96 | 128 | VPusCfsaaaCfaGfUfuaaaAfuCfcucuusu | 172 |
| 1191508.1 | | | sa | |
| AD- | asgsagg(Ahd)UfuUfUfAfacuguuuguaL96 | 129 | VPusAfscaaAfcAfGfuuaaAfaUfccucusu | 173 |
| 1191509.1 | | | su | |
| AD- | gsasgga(Uhd)UfuUfAfAfcuguuuguaaL96 | 130 | VPusUfsacaAfaCfAfguuaAfaAfuccucsu | 174 |
| 1191510.1 | | | su | |
| AD- | usgsggu(Ghd)UfaAfAfUfagauuguuaaL96 | 131 | VPusUfsaacAfaUfCfuauuUfaCfacccasgs | 175 |
| 1191558.1 | | | g | |
| AD- | gsgsgug(Uhd)AfaAfUfAfgauuguuauaL96 | 132 | VPusAfsuaaCfaAfUfcuauUfuAfcacccsa | 176 |
| 1191559.1 | | | sg | |
| AD- | asasuuc(Ahd)CfaCfCfAfuucaacuugaL96 | 133 | VPusCfsaagUfuGfAfauggUfgUfgaauusg | 177 |
| 1191578.1 | | | sa | |
| AD- | gsusccc(Uhd)GfgUfGfUfcuuaguuucaL96 | 134 | VPusGfsaaaCfuAfAfgacaCfcAfgggacsu | 178 |
| 1191612.1 | | | sc | |
| AD- | gsuscuu(Ahd)GfuUfUfCfcacaguaagaL96 | 135 | VPusCfsuuaCfuGfUfggaaAfcUfaagacsa | 179 |
| 1191621.1 | | | sc | |
| AD- | uscsuua(Ghd)UfuUfCfCfacaguaaggaL96 | 136 | VPusCfscuuAfcUfGfuggaAfaCfuaagasc | 180 |
| 1191622.1 | | | sa | |
| AD- | ususagu(Uhd)UfcCfAfCfaguaagguuaL96 | 137 | VPusAfsaccUfuAfCfugugGfaAfacuaasg | 181 |
| 1191624.1 | | | sa | |
| AD- | asgsacc(Uhd)CfuGfUfUfcaauaaauuaL96 | 138 | VPusAfsauuUfaUfUfgaacAfgAfggucusg | 182 |
| 1191655.1 | | | su | |
| AD- | ascscuc(Uhd)GfuUfCfAfauaaauuauaL96 | 139 | VPusAfsuaaUfuUfAfuugaAfcAfgaggusc | 183 |
| 1191657.1 | | | su | |
| AD- | csuscug(Uhd)UfcAfAfUfaaauuauugaL96 | 140 | VPusCfsaauAfaUfUfuauuGfaAfcagagsg | 184 |
| 1191658.1 | | | su | |
| AD- | uscsugu(Uhd)CfaAfUfAfaauuauuggaL96 | 141 | VPusCfscaaUfaAfUfuuauUfgAfacagasg | 185 |
| 1191659.1 | | | sg | |
| AD- | csusguu(Chd)AfaUfAfAfauuauuggcaL96 | 142 | VPusGfsccaAfuAfAfuuuaUfuGfaacagsa | 186 |
| 1191660.1 | | | sg | |
| AD- | usgsuuc(Ahd)AfuAfAfAfuuauuggcaaL96 | 143 | VPusUfsgccAfaUfAfauuuAfuUfgaacasg | 187 |
| 1191661.1 | | | sa | |
| AD- | ususcaa(Uhd)AfaAfUfUfauuggcaugaL96 | 144 | VPusCfsaugCfcAfAfuaauUfuAfuugaasc | 188 |
| 1191663.1 | | | sa | |
| | | | | SEQ |
| | | Duplex | | ID |
| | | Name | mRNA target sequence 5′ to 3′ | NO: |
| | | AD- | GGCUUACACUGACAUCAAAGUG | 189 |
| | | 1190533.1 | A | |
| | | AD- | ACUGACAUCAAAGUGAUUGGUA | 190 |
| | | 1190540.1 | A | |
| | | AD- | GGCCAUCAAGAAGGUUCUUCAG | 191 |
| | | 1190617.1 | G | |
| | | AD- | GAAGGUUCUUCAGGACAAAAGG | 192 |
| | | 1190626.1 | U | |
| | | AD- | AAGGUUCUUCAGGACAAAAGGU | 193 |
| | | 1190627.1 | U | |
| | | AD- | AGGUUCUUCAGGACAAAAGGUU | 194 |
| | | 1190628.1 | C | |
| | | AD- | CGAGAACUGCAGAUUAUGCGUA | 195 |
| | | 1190657.1 | A | |
| | | AD- | ACUGCAGAUUAUGCGUAAGCUG | 196 |
| | | 1190662.1 | G | |
| | | AD- | CCUAUCAUCUACAUCAAGGUGU | 197 |
| | | 1190793.1 | A | |
| | | AD- | GCUGUCCUCAAGCUCUGCGAUU | 198 |
| | | 1190893.1 | U | |
| | | AD- | UCCUCAAGCUCUGCGAUUUUGG | 199 |
| | | 1190897.1 | C | |
| | | AD- | CCUCAAGCUCUGCGAUUUUGGC | 200 |
| | | 1190898.1 | A | |
| | | AD- | CUCAAGCUCUGCGAUUUUGGCA | 201 |
| | | 1190899.1 | G | |
| | | AD- | UCAAGCUCUGCGAUUUUGGCAG | 202 |
| | | 1190900.1 | U | |
| | | AD- | AGCCCAAUGUGUCCUACAUCUG | 203 |
| | | 1190925.1 | C | |
| | | AD- | CGUGCUCCAGAACUCAUCUUUG | 204 |
| | | 1190960.1 | G | |
| | | AD- | GUGCUCCAGAACUCAUCUUUGG | 205 |
| | | 1190961.1 | A | |
| | | AD- | UGCUCCAGAACUCAUCUUUGGA | 206 |
| | | 1190962.1 | G | |
| | | AD- | GCUCCAGAACUCAUCUUUGGAG | 207 |
| | | 1190963.1 | C | |
| | | AD- | CUCCAGAACUCAUCUUUGGAGC | 208 |
| | | 1190964.1 | C | |
| | | AD- | CCGAGAGAUGAACCCUAACUAU | 209 |
| | | 1191109.1 | A | |
| | | AD- | UGGACAAAGGUGUUCAAAUCUU | 210 |
| | | 1191146.1 | C | |
| | | AD- | GUGCCCACAGCUUCUUCGAUGA | 211 |
| | | 1191232.1 | A | |
| | | AD- | ACAGCUUCUUCGAUGAACUGCG | 212 |
| | | 1191238.1 | G | |
| | | AD- | ACCCAUCCUCACAAGCUUUAAC | 213 |
| | | 1191336.1 | U | |
| | | AD- | CCCAUCCUCACAAGCUUUAACU | 214 |
| | | 1191337.1 | G | |
| | | AD- | CCAUCCUCACAAGCUUUAACUG | 215 |
| | | 1191338.1 | A | |
| | | AD- | UAAAGAGGAUUUUAACUGUUUG | 216 |
| | | 1191508.1 | U | |
| | | AD- | AAAGAGGAUUUUAACUGUUUGU | 217 |
| | | 1191509.1 | A | |
| | | AD- | AAGAGGAUUUUAACUGUUUGUA | 218 |
| | | 1191510.1 | G | |
| | | AD- | CCUGGGUGUAAAUAGAUUGUUA | 219 |
| | | 1191558.1 | U | |
| | | AD- | CUGGGUGUAAAUAGAUUGUUAU | 220 |
| | | 1191559.1 | A | |
| | | AD- | UCAAUUCACACCAUUCAACUUG | 221 |
| | | 1191578.1 | C | |
| | | AD- | GAGUCCCUGGUGUCUUAGUUUC | 222 |
| | | 1191612.1 | C | |
| | | AD- | GUGUCUUAGUUUCCACAGUAAG | 223 |
| | | 1191621.1 | G | |
| | | AD- | UGUCUUAGUUUCCACAGUAAGG | 224 |
| | | 1191622.1 | U | |
| | | AD- | UCUUAGUUUCCACAGUAAGGUU | 225 |
| | | 1191624.1 | U | |
| | | AD- | ACAGACCUCUGUUCAAUAAAUU | 226 |
| | | 1191655.1 | A | |
| | | AD- | AGACCUCUGUUCAAUAAAUUAU | 227 |
| | | 1191657.1 | U | |
| | | AD- | ACCUCUGUUCAAUAAAUUAUUG | 228 |
| | | 1191658.1 | G | |
| | | AD- | CCUCUGUUCAAUAAAUUAUUGG | 229 |
| | | 1191659.1 | C | |
| | | AD- | CUCUGUUCAAUAAAUUAUUGGC | 230 |
| | | 1191660.1 | A | |
| | | AD- | UCUGUUCAAUAAAUUAUUGGCA | 231 |
| | | 1191661.1 | U | |
| | | AD- | UGUUCAAUAAAUUAUUGGCAUG | 232 |
| | | 1191663.1 | A | |

TABLE 4
Unmodified Sense and Antisense Strand Sequences of Glycogen Synthase Kinase 3 alpha dsRNA Agents

| | | SEQ | | | SEQ | |
|---|---|---|---|---|---|---|
| Duplex | | ID | Range in | | ID | Range in |
| Name | Sense Sequence 5′ to 3′ | NO: | NM_001031667.1 | Antisense Sequence 5′ to 3′ | NO: | NM_001031667.1 |
| AD-1531847 | CCAUCCUCACAAGCUUUAACA | 37 | 1575-1595 | UGUUAAAGCUUGUGAGGAUGGGU | 81 | 1573-1595 |
| AD-1531848 | GAGGAUUUUAACUGUUUGUAA | 42 | 1847-1867 | UUACAAACAGUUAAAAUCCUCUU | 86 | 1845-1867 |
| AD-1531849 | AAUUCACACCAUUCAACUUGA | 45 | 2077-2097 | UCAAGUUGAAUGGUGUGAAUUGA | 89 | 2075-2097 |
| AD-1531850 | CUCUGUUCAAUAAAUUAUUGA | 52 | 2227-2247 | UCAAUAAUUUAUUGAACAGAGGU | 96 | 2225-2247 |

TABLE 5
Modified Sense and Antisense Strand Sequences of Glycogen Synthase Kinase 3 alpha dsRNA Agents

| | | SEQ | | SEQ | | SEQ |
|---|---|---|---|---|---|---|
| Duplex | | ID | | ID | mRNA target sequence | ID |
| Name | Sense Sequence 5′ to 3′ | NO: | Antisense Sequence 5′ to 3′ | NO: | 5′ to 3′ | NO: |
| AD- | cscsauc(Chd)UfcAfCfAfagcuuua | 233 | VPusGfsuuaAfaGfCfuuguGfaGfgaug | 169 | ACCCAUCCUCACAAGCUUUA | 213 |
| 1531847 | ascsa | | gsgsu | | ACU | |
| AD- | gsasgga(Uhd)UfuUfAfAfcuguuug | 234 | VPusUfsacaAfaCfAfguuaAfaAfuccu | 174 | AAGAGGAUUUUAACUGUUUG | 218 |
| 1531848 | usasa | | csusu | | UAG | |
| AD- | asasuuc(Ahd)CfaCfCfAfuucaacu | 235 | VPusCfsaagUfuGfAfauggUfgUfgaau | 177 | UCAAUUCACACCAUUCAACU | 221 |
| 1531849 | usgsa | | usgsa | | UGC | |
| AD- | csuscug(Uhd)UfcAfAfUfaaauuau | 236 | VPusCfsaauAfaUfUfuauuGfaAfcaga | 184 | ACCUCUGUUCAAUAAAUUAU | 228 |
| 1531850 | usgsa | | gsgsu | | UGG | |

TABLE 6
Glycogen Synthase Kinase 3 alpha In Vitro
Single Dose Screens in Neuro2A cells

| | 10 nM | | 1 nM | | 0.1 nM | |
|---|---|---|---|---|---|---|
| | Average % | | Average % | | Average % | |
| | message | | message | | message | |
| Duplex | remaining | SD | remaining | SD | remaining | SD |
| AD-1190533.1 | 3 | 1 | 12 | 3 | 22 | 4 |
| AD-1190540.1 | 2 | 0 | 10 | 3 | 28 | 10 |
| AD-1190617.1 | 37 | 4 | 77 | 15 | 98 | 6 |
| AD-1190626.1 | 9 | 1 | 48 | 9 | 94 | 5 |
| AD-1190627.1 | 13 | 2 | 66 | 9 | 99 | 1 |
| AD-1190628.1 | 5 | 0 | 14 | 4 | 45 | 8 |
| AD-1190657.1 | 3 | 0 | 9 | 3 | 22 | 4 |
| AD-1190662.1 | 6 | 1 | 32 | 7 | 58 | 9 |
| AD-1190793.1 | 11 | 1 | 12 | 1 | 27 | 4 |
| AD-1190893.1 | 6 | 1 | 15 | 3 | 42 | 8 |
| AD-1190897.1 | 6 | 1 | 19 | 5 | 55 | 7 |
| AD-1190898.1 | 8 | 2 | 34 | 10 | 64 | 4 |
| AD-1190899.1 | 10 | 1 | 33 | 6 | 71 | 2 |
| AD-1190900.1 | 14 | 4 | 46 | 16 | 94 | 16 |
| AD-1190925.1 | 3 | 0 | 18 | 2 | 20 | 3 |
| AD-1190960.1 | 6 | 2 | 26 | 8 | 58 | 18 |
| AD-1190961.1 | 6 | 1 | 29 | 6 | 74 | 10 |
| AD-1190962.1 | 5 | 0 | 15 | 2 | 54 | 5 |
| AD-1190963.1 | 12 | 2 | 26 | 11 | 100 | 16 |
| AD-1190964.1 | 14 | 4 | 54 | 7 | 132 | 30 |
| AD-1191109.1 | 8 | 2 | 60 | 9 | 89 | 4 |
| AD-1191146.1 | 6 | 3 | 10 | 3 | 33 | 9 |
| AD-1191232.1 | 10 | 4 | 36 | 5 | 79 | 11 |
| AD-1191238.1 | 5 | 1 | 6 | 1 | 21 | 5 |
| AD-1191336.1 | 3 | 1 | 5 | 1 | 17 | 7 |
| AD-1191337.1 | 6 | 2 | 6 | 1 | 18 | 5 |
| AD-1191338.1 | 7 | 2 | 14 | 4 | 51 | 17 |
| AD-1191508.1 | 3 | 2 | 5 | 1 | 15 | 4 |
| AD-1191509.1 | 3 | 1 | 9 | 2 | 16 | 3 |
| AD-1191510.1 | 2 | 0 | 5 | 1 | 9 | 2 |
| AD-1191558.1 | 4 | 1 | 8 | 3 | 13 | 3 |
| AD-1191559.1 | 5 | 0 | 10 | 6 | 41 | 7 |
| AD-1191578.1 | 1 | 0 | 5 | 1 | 17 | 5 |
| AD-1191612.1 | 4 | 0 | 8 | 2 | 18 | 3 |
| AD-1191621.1 | 6 | 1 | 13 | 3 | 65 | 13 |
| AD-1191622.1 | 9 | 3 | 22 | 10 | 63 | 11 |
| AD-1191624.1 | 12 | 1 | 23 | 7 | 82 | 14 |
| AD-1191655.1 | 3 | 0 | 6 | 3 | 21 | 8 |
| AD-1191657.1 | 2 | 1 | 6 | 1 | 15 | 3 |
| AD-1191658.1 | 2 | 0 | 5 | 1 | 11 | 1 |
| AD-1191659.1 | 2 | 0 | 3 | 1 | 10 | 2 |
| AD-1191660.1 | 2 | 1 | 5 | 0 | 18 | 4 |
| AD-1191661.1 | 5 | 1 | 7 | 1 | 22 | 6 |
| AD-1191663.1 | 5 | 2 | 9 | 2 | 53 | 12 |

### Example 2. In Vivo Screen

[0841] Duplexes of interest identified from the in vitro assays, AD-1191336.1, AD-1191510.1, AD-1191578.1, and AD-1191658.1, were evaluated in vivo. In particular, at day 0, groups of three mice were subcutaneously administered a single 10 mg/kg dose of the agents of interest or PBS control. At day 14 post-dose animals were sacrificed, liver samples were collected and snap-frozen in liquid nitrogen. Tissue mRNA was extracted and was pre-amplified prior to analysis with TaqMan™ PreAmp Master Mix Kit to increase the signal of transcript expression into the dynamic range of the qPCR assay and then analyzed by the RT-QPCR method.

[0842] GSK3α and GSK3β mRNA levels were compared to housekeeping gene GAPDH. The values were then normalized to the average of the PBS vehicle control group. The data were expressed as percent of baseline value, and presented as mean plus standard deviation. The results, listed in Table 7 and shown in FIG. 1, demonstrated that all of the duplexes effectively and selectively reduced the level of GSK3α mRNA in vivo, but not the level of GSK3β mRNA.

TABLE 7
In vivo screen

| | | | GSK3α | | GSK3β | |
|---|---|---|---|---|---|---|
| | Duplex Name | | (% average | | (% average | |
| | (GalNAc + | Duplex Name | message | GSK3α | message | GSK3β |
| Blinded name | C16) | (C16) | remaining) | (Stdev.) | remaining) | (Stdev.) |
| PBS | | | 100 | 13 | 100 | 30 |
| GSK3A_si25 | AD-1191336.1 | AD-1531847 | 17 | 4 | 95 | 9 |
| GSK3A_si30 | AD-1191510.1 | AD-1531848 | 28 | 6 | 88 | 14 |
| GSK3A_si33 | AD-1191578.1 | AD-1531849 | 20 | 5 | 85 | 14 |
| GSK3A_si40 | AD-1191658.1 | AD-1531850 | 27 | 8 | 93 | 18 |

### Example 3. Design, Synthesis and In Vitro Screening of Additional dsRNA Duplexes

[0843] Additional siRNA duplexes targeting the human GSK3α gene were designed and synthesized using the methods described above in Example 1. In particular, siRNAs targeting the human GSK3α gene (refseqID NM_019884.3; NCBI GeneID: 2931) were designed using custom R and Python scripts. The human NM_019884.3 REFSEQ mRNA has a length of 2193 bases. In vitro screening assays in A549 cells with the siRNAs were performed as described above.

[0844] Detailed lists of the additional unmodified GSK3α sense and antisense strand nucleotide sequences are shown in Table 8. Detailed lists of the modified GSK3α sense and antisense strand nucleotide sequences are shown in Table 9. The results of the single dose screen of the agents in Tables 8 and 9 in A549 cells are shown in Table 10.

TABLE 8
Unmodified Sense and Antisense Strand Sequences of Glycogen Synthase Kinase 3 alpha dsRNA Agents

| | | SEQ | | | SEQ | |
|---|---|---|---|---|---|---|
| Duplex | | ID | Range in | | ID | Range in |
| Name | Sense Sequence 5′ to 3′ | NO. | NM_019884.3 | Antisense Sequence 5′ to 3′ | NO. | NM_019884.3 |
| AD-1622033 | AAGGUGACCACAGUCGUAGCA | 237 | 432-452 | UGCUACGACUGUGGUCACCUUCC | 370 | 430-452 |
| AD-1622039 | ACCACAGUCGUAGCCACUCUA | 238 | 438-458 | UAGAGUGGCUACGACUGUGGUCA | 371 | 436-458 |
| AD-1622046 | UCGUAGCCACUCUAGGCCAAA | 239 | 445-465 | UUUGGCCUAGAGUGGCUACGACU | 372 | 443-465 |
| AD-1622072 | AGCGCUCCCAAGAAGUGGCUA | 240 | 472-492 | UAGCCACUUCUUGGGAGCGCUCU | 373 | 470-492 |
| AD-1622078 | CCCAAGAAGUGGCUUACACGA | 241 | 478-498 | UCGUGUAAGCCACUUCUUGGGAG | 374 | 476-498 |
| AD-1622017 | AGCGGGAAGGUGACCACAGUA | 242 | 426-446 | UACUGUGGUCACCUUCCCGCUGU | 375 | 424-446 |
| AD-1622088 | GGCUUACACGGACAUCAAAGA | 243 | 488-508 | UCUUUGAUGUCCGUGUAAGCCAC | 376 | 486-508 |
| AD-1622098 | GACAUCAAAGUGAUUGGCAAA | 244 | 498-518 | UUUGCCAAUCACUUUGAUGUCCG | 377 | 496-518 |
| AD-1622108 | UGAUUGGCAAUGGCUCAUUUA | 245 | 508-528 | UAAAUGAGCCAUUGCCAAUCACU | 378 | 506-528 |
| AD-1622137 | GAGACCAGGGAACUAGUCGCA | 246 | 555-575 | UGCGACUAGUUCCCUGGUCUCUG | 379 | 553-575 |
| AD-1622143 | AGGGAACUAGUCGCCAUCAAA | 247 | 561-581 | UUUGAUGGCGACUAGUUCCCUGG | 380 | 559-581 |
| AD-1622149 | CUAGUCGCCAUCAAGAAGGUA | 248 | 567-587 | UACCUUCUUGAUGGCGACUAGUU | 381 | 565-587 |
| AD-1622155 | GCCAUCAAGAAGGUUCUCCAA | 249 | 573-593 | UUGGAGAACCUUCUUGAUGGCGA | 382 | 571-593 |
| AD-1622161 | AAGAAGGUUCUCCAGGACAAA | 250 | 579-599 | UUUGUCCUGGAGAACCUUCUUGA | 383 | 577-599 |
| AD-1622187 | CCAGGACAAGAGGUUCAAGAA | 251 | 590-610 | UUCUUGAACCUCUUGUCCUGGAG | 384 | 588-610 |
| AD-1622197 | AGGUUCAAGAACCGAGAGCUA | 252 | 600-620 | UAGCUCUCGGUUCUUGAACCUCU | 385 | 598-620 |
| AD-1622203 | AAGAACCGAGAGCUGCAGAUA | 253 | 606-626 | UAUCUGCAGCUCUCGGUUCUUGA | 386 | 604-626 |
| AD-1622209 | CGAGAGCUGCAGAUCAUGCGA | 254 | 612-632 | UCGCAUGAUCUGCAGCUCUCGGU | 387 | 610-632 |
| AD-1622215 | CUGCAGAUCAUGCGUAAGCUA | 255 | 618-638 | UAGCUUACGCAUGAUCUGCAGCU | 388 | 616-638 |
| AD-1622223 | CAUGCGUAAGCUGGACCACUA | 256 | 626-646 | UAGUGGUCCAGCUUACGCAUGAU | 389 | 624-646 |
| AD-1622226 | CUGCAAUAUUGUGAGGCUGAA | 257 | 644-664 | UUCAGCCUCACAAUAUUGCAGUG | 390 | 642-664 |
| AD-1622235 | UGUGAGGCUGAGAUACUUUUA | 258 | 653-673 | UAAAAGUAUCUCAGCCUCACAAU | 391 | 651-673 |
| AD-1622241 | GCUGAGAUACUUUUUCUACUA | 259 | 659-679 | UAGUAGAAAAAGUAUCUCAGCCU | 392 | 657-679 |
| AD-1622247 | AUACUUUUUCUACUCCAGUGA | 260 | 665-685 | UCACUGGAGUAGAAAAAGUAUCU | 393 | 663-685 |
| AD-1622253 | UUUCUACUCCAGUGGCGAGAA | 261 | 671-691 | UUCUCGCCACUGGAGUAGAAAAA | 394 | 669-691 |
| AD-1622260 | UCCAGUGGCGAGAAGAAAGAA | 262 | 678-698 | UUCUUUCUUCUCGCCACUGGAGU | 395 | 676-698 |
| AD-1622266 | GGCGAGAAGAAAGACGAGCUA | 263 | 684-704 | UAGCUCGUCUUUCUUCUCGCCAC | 396 | 682-704 |
| AD-1622272 | AAGAAAGACGAGCUUUACCUA | 264 | 690-710 | UAGGUAAAGCUCGUCUUUCUUCU | 397 | 688-710 |
| AD-1622179 | GGACCACUGCAAUAUUGUGAA | 265 | 638-658 | UUCACAAUAUUGCAGUGGUCCAG | 398 | 636-658 |
| AD-1622278 | GACGAGCUUUACCUAAAUCUA | 266 | 696-716 | UAGAUUUAGGUAAAGCUCGUCUU | 399 | 694-716 |
| AD-1622284 | CUUUACCUAAAUCUGGUGCUA | 267 | 702-722 | UAGCACCAGAUUUAGGUAAAGCU | 400 | 700-722 |
| AD-1622296 | CUAAAUCUGGUGCUGGAAUAA | 268 | 708-728 | UUAUUCCAGCACCAGAUUUAGGU | 401 | 706-728 |
| AD-1622307 | GCUGGAAUAUGUGCCCGAGAA | 269 | 719-739 | UUCUCGGGCACAUAUUCCAGCAC | 402 | 717-739 |
| AD-1622314 | UAUGUGCCCGAGACAGUGUAA | 270 | 726-746 | UUACACUGUCUCGGGCACAUAUU | 403 | 724-746 |
| AD-1622320 | CCCGAGACAGUGUACCGGGUA | 271 | 732-752 | UACCCGGUACACUGUCUCGGGCA | 404 | 730-752 |
| AD-1622337 | UUCACCAAGGCCAAGUUGACA | 272 | 762-782 | UGUCAACUUGGCCUUGGUGAAGU | 405 | 760-782 |
| AD-1622352 | GGCCAAGUUGACCAUCCCUAA | 273 | 770-790 | UUAGGGAUGGUCAACUUGGCCUU | 406 | 768-790 |
| AD-1622359 | UUGACCAUCCCUAUCCUCUAA | 274 | 777-797 | UUAGAGGAUAGGGAUGGUCAACU | 407 | 775-797 |
| AD-1622365 | AUCCCUAUCCUCUAUGUCAAA | 275 | 783-803 | UUUGACAUAGAGGAUAGGGAUGG | 408 | 781-803 |
| AD-1622374 | CUCUAUGUCAAGGUGUACAUA | 276 | 792-812 | UAUGUACACCUUGACAUAGAGGA | 409 | 790-812 |
| AD-1622380 | GUCAAGGUGUACAUGUACCAA | 277 | 798-818 | UUGGUACAUGUACACCUUGACAU | 410 | 796-818 |
| AD-1622289 | CGCCACUUCACCAAGGCCAAA | 278 | 756-776 | UUUGGCCUUGGUGAAGUGGCGGG | 411 | 754-776 |
| AD-1622388 | UACCAGCUCUUCCGCAGCUUA | 279 | 813-833 | UAAGCUGCGGAAGAGCUGGUACA | 412 | 811-833 |
| AD-1622396 | CUUCCGCAGCUUGGCCUACAA | 280 | 821-841 | UUGUAGGCCAAGCUGCGGAAGAG | 413 | 819-841 |
| AD-1622460 | GGCGUGUGUCACCGCGACAUA | 281 | 852-872 | UAUGUCGCGGUGACACACGCCCU | 414 | 850-872 |
| AD-1622344 | GUGUACAUGUACCAGCUCUUA | 282 | 804-824 | UAAGAGCUGGUACAUGUACACCU | 415 | 802-824 |
| AD-1622466 | UGUCACCGCGACAUCAAGCCA | 283 | 858-878 | UGGCUUGAUGUCGCGGUGACACA | 416 | 856-878 |
| AD-1622399 | UUGGCCUACAUCCACUCCCAA | 284 | 831-851 | UUGGGAGUGGAUGUAGGCCAAGC | 417 | 829-851 |
| AD-1622489 | CAGUGCAAAGCAGUUGGUCCA | 285 | 932-952 | UGGACCAACUGCUUUGCACUGCC | 418 | 930-952 |
| AD-1622402 | ACCCUGACACUGCUGUCCUCA | 286 | 895-915 | UGAGGACAGCAGUGUCAGGGUCC | 419 | 893-915 |
| AD-1622409 | CACUGCUGUCCUCAAGCUCUA | 287 | 902-922 | UAGAGCUUGAGGACAGCAGUGUC | 420 | 900-922 |
| AD-1622496 | GAGCCCAAUGUCUCCUACAUA | 288 | 957-977 | UAUGUAGGAGACAUUGGGCUCCC | 421 | 955-977 |
| AD-1622415 | UGUCCUCAAGCUCUGCGAUUA | 22 | 908-928 | UAAUCGCAGAGCUUGAGGACAGC | 66 | 906-928 |
| AD-1622502 | AAUGUCUCCUACAUCUGUUCA | 289 | 963-983 | UGAACAGAUGUAGGAGACAUUGG | 422 | 961-983 |
| AD-1622422 | AAGCUCUGCGAUUUUGGCAGA | 26 | 915-935 | UCUGCCAAAAUCGCAGAGCUUGA | 70 | 913-935 |
| AD-1622511 | UACAUCUGUUCUCGCUACUAA | 290 | 972-992 | UUAGUAGCGAGAACAGAUGUAGG | 423 | 970-992 |
| AD-1622428 | UGCGAUUUUGGCAGUGCAAAA | 291 | 921-941 | UUUUGCACUGCCAAAAUCGCAGA | 424 | 919-941 |
| AD-1622518 | GUUCUCGCUACUACCGGGCCA | 292 | 979-999 | UGGCCCGGUAGUAGCGAGAACAG | 425 | 977-999 |
| AD-1622522 | AGCUCAUCUUUGGAGCCACUA | 293 | 1003-1023 | UAGUGGCUCCAAAGAUGAGCUCU | 426 | 1001-1023 |
| AD-1622528 | UCUUUGGAGCCACUGAUUACA | 294 | 1009-1029 | UGUAAUCAGUGGCUCCAAAGAUG | 427 | 1007-1029 |
| AD-1622532 | GAGCCACUGAUUACACCUCAA | 295 | 1015-1035 | UUGAGGUGUAAUCAGUGGCUCCA | 428 | 1013-1035 |
| AD-1622539 | UGAUUACACCUCAUCCAUCGA | 296 | 1022-1042 | UCGAUGGAUGAGGUGUAAUCAGU | 429 | 1020-1042 |
| AD-1622545 | CACCUCAUCCAUCGAUGUUUA | 297 | 1028-1048 | UAAACAUCGAUGGAUGAGGUGUA | 430 | 1026-1048 |
| AD-1622551 | AUCCAUCGAUGUUUGGUCAGA | 298 | 1034-1054 | UCUGACCAAACAUCGAUGGAUGA | 431 | 1032-1054 |
| AD-1622570 | GCUGGCUGUGUACUGGCAGAA | 299 | 1053-1073 | UUCUGCCAGUACACAGCCAGCUG | 432 | 1051-1073 |
| AD-1622580 | UACUGGCAGAGCUCCUCUUGA | 300 | 1063-1083 | UCAAGAGGAGCUCUGCCAGUACA | 433 | 1061-1083 |
| AD-1622596 | CUUGGGCCAGCCCAUCUUCCA | 301 | 1079-1099 | UGGAAGAUGGGCUGGCCCAAGAG | 434 | 1077-1099 |
| AD-1622609 | CAGCUGGUGGAGAUCAUCAAA | 302 | 1119-1139 | UUUGAUGAUCUCCACCAGCUGGU | 435 | 1117-1139 |
| AD-1622615 | GUGGAGAUCAUCAAGGUGCUA | 303 | 1125-1145 | UAGCACCUUGAUGAUCUCCACCA | 436 | 1123-1145 |
| AD-1622627 | AAGGUGCUGGGAACACCAACA | 304 | 1137-1157 | UGUUGGUGUUCCCAGCACCUUGA | 437 | 1135-1157 |
| AD-1622634 | UGGGAACACCAACCCGGGAAA | 305 | 1144-1164 | UUUCCCGGGUUGGUGUUCCCAGC | 438 | 1142-1164 |
| AD-1622645 | CCAACCCGGGAACAAAUCCGA | 306 | 1152-1172 | UCGGAUUUGUUCCCGGGUUGGUG | 439 | 1150-1172 |
| AD-1622651 | CGGGAACAAAUCCGAGAGAUA | 307 | 1158-1178 | UAUCUCUCGGAUUUGUUCCCGGG | 440 | 1156-1178 |
| AD-1622659 | ACACGGAGUUCAAGUUCCCUA | 308 | 1189-1209 | UAGGGAACUUGAACUCCGUGUAG | 441 | 1187-1209 |
| AD-1622666 | GUUCAAGUUCCCUCAGAUUAA | 309 | 1196-1216 | UUAAUCUGAGGGAACUUGAACUC | 442 | 1194-1216 |
| AD-1622672 | GUUCCCUCAGAUUAAAGCUCA | 310 | 1202-1222 | UGAGCUUUAAUCUGAGGGAACUU | 443 | 1200-1222 |
| AD-1622676 | CUGGACAAAGGUGUUCAAAUA | 311 | 1226-1246 | UAUUUGAACACCUUUGUCCAGGG | 444 | 1224-1246 |
| AD-1622682 | AAAGGUGUUCAAAUCUCGAAA | 312 | 1232-1252 | UUUCGAGAUUUGAACACCUUUGU | 445 | 1230-1252 |
| AD-1622688 | GUUCAAAUCUCGAACGCCGCA | 313 | 1238-1258 | UGCGGCGUUCGAGAUUUGAACAC | 446 | 1236-1258 |
| AD-1622706 | AGGCCAUCGCGCUCUGCUCUA | 314 | 1261-1281 | UAGAGCAGAGCGCGAUGGCCUCU | 447 | 1259-1281 |
| AD-1622712 | UCGCGCUCUGCUCUAGCCUGA | 315 | 1267-1287 | UCAGGCUAGAGCAGAGCGCGAUG | 448 | 1265-1287 |
| AD-1622723 | UCUAGCCUGCUGGAGUACACA | 316 | 1278-1298 | UGUGUACUCCAGCAGGCUAGAGC | 449 | 1276-1298 |
| AD-1622737 | GUGCGCACAGCUUCUUUGAUA | 317 | 1330-1350 | UAUCAAAGAAGCUGUGCGCACAG | 450 | 1328-1350 |
| AD-1622743 | ACAGCUUCUUUGAUGAACUGA | 318 | 1336-1356 | UCAGUUCAUCAAAGAAGCUGUGC | 451 | 1334-1356 |
| AD-1622751 | UUUGAUGAACUGCGAUGUCUA | 319 | 1344-1364 | UAGACAUCGCAGUUCAUCAAAGA | 452 | 1342-1364 |
| AD-1622757 | GAACUGCGAUGUCUGGGAACA | 320 | 1350-1370 | UGUUCCCAGACAUCGCAGUUCAU | 453 | 1348-1370 |
| AD-1622763 | CGAUGUCUGGGAACCCAGCUA | 321 | 1356-1376 | UAGCUGGGUUCCCAGACAUCGCA | 454 | 1354-1376 |
| AD-1622775 | ACCCAGCUGCCUAACAACCGA | 322 | 1368-1388 | UCGGUUGUUAGGCAGCUGGGUUC | 455 | 1366-1388 |
| AD-1622782 | UGCCUAACAACCGCCCACUUA | 323 | 1375-1395 | UAAGUGGGCGGUUGUUAGGCAGC | 456 | 1373-1395 |
| AD-1622785 | CUCUCUUCAACUUCAGUGCUA | 324 | 1399-1419 | UAGCACUGAAGUUGAAGAGAGGG | 457 | 1397-1419 |
| AD-1622801 | CAACUUCAGUGCUGGUGAACA | 325 | 1406-1426 | UGUUCACCAGCACUGAAGUUGAA | 458 | 1404-1426 |
| AD-1622808 | AGUGCUGGUGAACUCUCCAUA | 326 | 1413-1433 | UAUGGAGAGUUCACCAGCACUGA | 459 | 1411-1433 |
| AD-1622814 | GGUGAACUCUCCAUCCAACCA | 327 | 1419-1439 | UGGUUGGAUGGAGAGUUCACCAG | 460 | 1417-1439 |
| AD-1622823 | UCCAUCCAACCGUCUCUCAAA | 328 | 1428-1448 | UUUGAGAGACGGUUGGAUGGAGA | 461 | 1426-1448 |
| AD-1622829 | CAACCGUCUCUCAACGCCAUA | 329 | 1434-1454 | UAUGGCGUUGAGAGACGGUUGGA | 462 | 1432-1454 |
| AD-1622835 | UCUCUCAACGCCAUUCUCAUA | 330 | 1440-1460 | UAUGAGAAUGGCGUUGAGAGACG | 463 | 1438-1460 |
| AD-1622842 | ACGCCAUUCUCAUCCCUCCUA | 331 | 1447-1467 | UAGGAGGGAUGAGAAUGGCGUUG | 464 | 1445-1467 |
| AD-1622851 | GUCCUCACAAGCUUUAACUGA | 332 | 1505-1525 | UCAGUUAAAGCUUGUGAGGACGG | 465 | 1503-1525 |
| AD-1622791 | UCUCAUCCCUCCUCACUUGAA | 333 | 1454-1474 | UUCAAGUGAGGAGGGAUGAGAAU | 466 | 1452-1474 |
| AD-1622857 | ACAAGCUUUAACUGAGACUCA | 334 | 1511-1531 | UGAGUCUCAGUUAAAGCUUGUGA | 467 | 1509-1531 |
| AD-1622863 | UUUAACUGAGACUCCGACCAA | 335 | 1517-1537 | UUGGUCGGAGUCUCAGUUAAAGC | 468 | 1515-1537 |
| AD-1622880 | CCAGCUCAGACUGGCAGUCGA | 336 | 1534-1554 | UCGACUGCCAGUCUGAGCUGGUC | 469 | 1532-1554 |
| AD-1622891 | UGGCAGUCGACCGAUGCCACA | 337 | 1545-1565 | UGUGGCAUCGGUCGACUGCCAGU | 470 | 1543-1565 |
| AD-1622910 | UCGACCGAUGCCACACCUACA | 338 | 1551-1571 | UGUAGGUGUGGCAUCGGUCGACU | 471 | 1549-1571 |
| AD-1622917 | AUGCCACACCUACCCUCACUA | 339 | 1558-1578 | UAGUGAGGGUAGGUGUGGCAUCG | 472 | 1556-1578 |
| AD-1622924 | ACCUACCCUCACUAACUCCUA | 340 | 1565-1585 | UAGGAGUUAGUGAGGGUAGGUGU | 473 | 1563-1585 |
| AD-1622930 | CCUCACUAACUCCUCCUGAGA | 341 | 1571-1591 | UCUCAGGAGGAGUUAGUGAGGGU | 474 | 1569-1591 |
| AD-1622935 | CACCAAGCACCCUUCCACUUA | 342 | 1596-1616 | UAAGUGGAAGGGUGCUUGGUGGG | 475 | 1594-1616 |
| AD-1622943 | ACCCUUCCACUUCCAUCUGGA | 343 | 1604-1624 | UCCAGAUGGAAGUGGAAGGGUGC | 476 | 1602-1624 |
| AD-1622952 | CCAUAGCCCAUCAAGCUCCUA | 344 | 1652-1672 | UAGGAGCUUGAUGGGCUAUGGCC | 477 | 1650-1672 |
| AD-1622963 | GCAGAGGUAAAUGAGUCCCUA | 345 | 1699-1719 | UAGGGACUCAUUUACCUCUGCCC | 478 | 1697-1719 |
| AD-1622897 | CCCAUCAAGCUCCUGCCCUGA | 346 | 1658-1678 | UCAGGGCAGGAGCUUGAUGGGCU | 479 | 1656-1678 |
| AD-1622977 | UCCCUCCCUCACCAGCCUCAA | 347 | 1733-1753 | UUGAGGCUGGUGAGGGAGGGACU | 480 | 1731-1753 |
| AD-1622980 | CUGUGGUGGGCUUUUUAAGAA | 348 | 1756-1776 | UUCUUAAAAAGCCCACCACAGGG | 481 | 1754-1776 |
| AD-1622986 | UGGGCUUUUUAAGAGGAUUUA | 349 | 1762-1782 | UAAAUCCUCUUAAAAAGCCCACC | 482 | 1760-1782 |
| AD-1622994 | UAAGAGGAUUUUAACUGGUUA | 350 | 1771-1791 | UAACCAGUUAAAAUCCUCUUAAA | 483 | 1769-1791 |
| AD-1622999 | AGGGAAGAGAAGGACAGGGUA | 351 | 1797-1817 | UACCCUGUCCUUCUCUUCCCUCC | 484 | 1795-1817 |
| AD-1623019 | CCUGUGUCCCUUGUAAAUAGA | 352 | 1896-1916 | UCUAUUUACAAGGGACACAGGAG | 485 | 1894-1916 |
| AD-1623039 | UCUCCUCUUCCCUUCCCUGGA | 353 | 1931-1951 | UCCAGGGAAGGGAAGAGGAGACG | 486 | 1929-1951 |
| AD-1623042 | CGGGUGUAAAUAGAUUGUUAA | 354 | 1955-1975 | UUAACAAUCUAUUUACACCCGGG | 487 | 1953-1975 |
| AD-1623013 | UUGUAAAUAGAACCAGCCCAA | 355 | 1906-1926 | UUGGGCUGGUUCUAUUUACAAGG | 488 | 1904-1926 |
| AD-1623047 | CUUAAAGAAAACGUCGAUUCA | 356 | 1985-2005 | UGAAUCGACGUUUUCUUUAAGAA | 489 | 1983-2005 |
| AD-1623053 | GAAAACGUCGAUUCGCACCGA | 357 | 1991-2011 | UCGGUGCGAAUCGACGUUUUCUU | 490 | 1989-2011 |
| AD-1623059 | GUCGAUUCGCACCGUCCAACA | 358 | 1997-2017 | UGUUGGACGGUGCGAAUCGACGU | 491 | 1995-2017 |
| AD-1623065 | UCGCACCGUCCAACCUGGCCA | 359 | 2003-2023 | UGGCCAGGUUGGACGGUGCGAAU | 492 | 2001-2023 |
| AD-1623066 | CAAGGUCUACUCCCUCCUCAA | 360 | 2066-2086 | UUGAGGAGGGAGUAGACCUUGGG | 493 | 2064-2086 |
| AD-1623104 | GCUCCUGAUGUCUUAGUUUCA | 361 | 2118-2138 | UGAAACUAAGACAUCAGGAGCUC | 494 | 2116-2138 |
| AD-1623111 | AUGUCUUAGUUUCCACAGUAA | 362 | 2125-2145 | UUACUGUGGAAACUAAGACAUCA | 495 | 2123-2145 |
| AD-1623117 | CCUGUGUACAGACCUCCGUUA | 363 | 2152-2172 | UAACGGAGGUCUGUACACAGGCA | 496 | 2150-2172 |
| AD-1623124 | ACAGACCUCCGUUCAAUAAAA | 364 | 2159-2179 | UUUUAUUGAACGGAGGUCUGUAC | 497 | 2157-2179 |
| AD-1623130 | CUCCGUUCAAUAAAUUAUUGA | 365 | 2165-2185 | UCAAUAAUUUAUUGAACGGAGGU | 498 | 2163-2185 |
| AD-1623071 | UAGUUUCCACAGUAAGGUUUA | 366 | 2131-2151 | UAAACCUUACUGUGGAAACUAAG | 499 | 2129-2151 |
| AD-1623077 | CCACAGUAAGGUUUGCCUGUA | 367 | 2137-2157 | UACAGGCAAACCUUACUGUGGAA | 500 | 2135-2157 |
| AD-1623084 | AAGGUUUGCCUGUGUACAGAA | 368 | 2144-2164 | UUCUGUACACAGGCAAACCUUAC | 501 | 2142-2164 |
| AD-1623089 | UCAAUAAAUUAUUGGCAUGAA | 369 | 2171-2191 | UUCAUGCCAAUAAUUUAUUGAAC | 502 | 2169-2191 |

TABLE 9
Modified Sense and Antisense Strand Sequences of Glycogen Synthase Kinase 3 alpha dsRNA Agents

| | | SEQ | | SEQ |
|---|---|---|---|---|
| Duplex | | ID | | ID |
| Name | Sense Sequence 5′ to 3′ | NO: | Antisense Sequence 5′ to 3′ | NO: |
| AD-1622033 | asasggu(Ghd)AfcCfAfCfagucguagscsa | 503 | VPusGfscuaCfgAfCfugugGfuCfaccuuscsc | 638 |
| AD-1622039 | ascscac(Ahd)GfuCfGfUfagccacucsusa | 504 | VPusAfsgagUfgGfCfuacgAfcUfgugguscsa | 639 |
| AD-1622046 | uscsgua(Ghd)CfcAfCfUfcuaggccasasa | 505 | VPusUfsuggCfcUfAfgaguGfgCfuacgascsu | 640 |
| AD-1622072 | asgscgc(Uhd)CfcCfAfAfgaaguggcsusa | 506 | VPusAfsgccAfcUfUfcuugGfgAfgegcuscsu | 641 |
| AD-1622078 | cscscaa(Ghd)AfaGfUfGfgcuuacacsgsa | 507 | VPusCfsgugUfaAfGfccacUfuCfuugggsasg | 642 |
| AD-1622017 | asgscgg(Ghd)AfaGfGfUfgaccacagsusa | 508 | VPusAfscugUfgGfUfcaccUfuCfccgcusgsu | 643 |
| AD-1622088 | gsgscuu(Ahd)CfaCfGfGfacaucaaasgsa | 509 | VPusCfsuuuGfaUfGfuccgUfgUfaagccsasc | 644 |
| AD-1622098 | gsascau(Chd)AfaAfGfUfgauuggcasasa | 510 | VPusUfsugcCfaAfUfcacuUfuGfaugucscsg | 645 |
| AD-1622108 | usgsauu(Ghd)GfcAfAfUfggcucauususa | 511 | VPusAfsaauGfaGfCfcauuGfcCfaaucascsu | 646 |
| AD-1622137 | gsasgac(Chd)AfgGfGfAfacuagucgscsa | 512 | VPusGfscgaCfuAfGfuuccCfuGfgucucsusg | 647 |
| AD-1622143 | asgsgga(Ahd)CfuAfGfUfcgccaucasasa | 513 | VPusUfsugaUfgGfCfgacuAfgUfucccusgsg | 648 |
| AD-1622149 | csusagu(Chd)GfcCfAfUfcaagaaggsusa | 514 | VPusAfsccuUfcUfUfgaugGfcGfacuagsusu | 649 |
| AD-1622155 | gscscau(Chd)AfaGfAfAfgguucuccsasa | 515 | VPusUfsggaGfaAfCfcuucUfuGfauggcsgsa | 650 |
| AD-1622161 | asasgaa(Ghd)GfuUfCfUfccaggacasasa | 516 | VPusUfsuguCfcUfGfgagaAfcCfuucuusgsa | 651 |
| AD-1622187 | cscsagg(Ahd)CfaAfGfAfgguucaagsasa | 517 | VPusUfscuuGfaAfCfcucuUfgUfccuggsasg | 652 |
| AD-1622197 | asgsguu(Chd)AfaGfAfAfccgagagcsusa | 518 | VPusAfsgcuCfuCfGfguucUfuGfaaccuscsu | 653 |
| AD-1622203 | asasgaa(Chd)CfgAfGfAfgcugcagasusa | 519 | VPusAfsucuGfcAfGfcucuCfgGfuucuusgsa | 654 |
| AD-1622209 | csgsaga(Ghd)CfuGfCfAfgaucaugcsgsa | 520 | VPusCfsgcaUfgAfUfcugcAfgCfucucgsgsu | 655 |
| AD-1622215 | csusgca(Ghd)AfuCfAfUfgcguaagcsusa | 521 | VPusAfsgcuUfaCfGfcaugAfuCfugcagscsu | 656 |
| AD-1622223 | csasugc(Ghd)UfaAfGfCfuggaccacsusa | 522 | VPusAfsgugGfuCfCfagcuUfaCfgcaugsasu | 657 |
| AD-1622226 | csusgca(Ahd)UfaUfUfGfugaggcugsasa | 523 | VPusUfscagCfcUfCfacaaUfaUfugcagsusg | 658 |
| AD-1622235 | usgsuga(Ghd)GfcUfGfAfgauacuuususa | 524 | VPusAfsaaaGfuAfUfcucaGfcCfucacasasu | 659 |
| AD-1622241 | gscsuga(Ghd)AfuAfCfUfuuuucuacsusa | 525 | VPusAfsguaGfaAfAfaaguAfuCfucagescsu | 660 |
| AD-1622247 | asusacu(Uhd)UfuUfCfUfacuccagusgsa | 526 | VPusCfsacuGfgAfGfuagaAfaAfaguauscsu | 661 |
| AD-1622253 | ususucu(Ahd)CfuCfCfAfguggcgagsasa | 527 | VPusUfscucGfcCfAfcuggAfgUfagaaasasa | 662 |
| AD-1622260 | uscscag(Uhd)GfgCfGfAfgaagaaagsasa | 528 | VPusUfscuuUfcUfUfcucgCfcAfcuggasgsu | 663 |
| AD-1622266 | gsgscga(Ghd)AfaGfAfAfagacgagcsusa | 529 | VPusAfsgcuCfgUfCfuuucUfuCfucgccsasc | 664 |
| AD-1622272 | asasgaa(Ahd)GfaCfGfAfgcuuuaccsusa | 530 | VPusAfsgguAfaAfGfcucgUfcUfuucuuscsu | 665 |
| AD-1622179 | gsgsacc(Ahd)CfuGfCfAfauauugugsasa | 531 | VPusUfscacAfaUfAfuugcAfgUfgguccsasg | 666 |
| AD-1622278 | gsascga(Ghd)CfuUfUfAfccuaaaucsusa | 532 | VPusAfsgauUfuAfGfguaaAfgCfucgucsusu | 667 |
| AD-1622284 | csusuua(Chd)CfuAfAfAfucuggugcsusa | 533 | VPusAfsgcaCfcAfGfauuuAfgGfuaaagscsu | 668 |
| AD-1622296 | csusaaa(Uhd)CfuGfGfUfgcuggaausasa | 534 | VPusUfsauuCfcAfGfcaccAfgAfuuuagsgsu | 669 |
| AD-1622307 | gscsugg(Ahd)AfuAfUfGfugcccgagsasa | 535 | VPusUfscucGfgGfCfacauAfuUfccagesasc | 670 |
| AD-1622314 | usasugu(Ghd)CfcCfGfAfgacagugusasa | 536 | VPusUfsacaCfuGfUfcucgGfgCfacauasusu | 671 |
| AD-1622320 | cscscga(Ghd)AfcAfGfUfguaccgggsusa | 537 | VPusAfscccGfgUfAfcacuGfuCfucgggscsa | 672 |
| AD-1622337 | ususcac(Chd)AfaGfGfCfcaaguugascsa | 538 | VPusGfsucaAfcUfUfggccUfuGfgugaasgsu | 673 |
| AD-1622352 | gsgscca(Ahd)GfuUfGfAfccaucccusasa | 539 | VPusUfsaggGfaUfGfgucaAfcUfuggccsusu | 674 |
| AD-1622359 | ususgac(Chd)AfuCfCfCfuauccucusasa | 540 | VPusUfsagaGfgAfUfagggAfuGfgucaascsu | 675 |
| AD-1622365 | asusccc(Uhd)AfuCfCfUfcuaugucasasa | 541 | VPusUfsugaCfaUfAfgaggAfuAfgggausgsg | 676 |
| AD-1622374 | csuscua(Uhd)GfuCfAfAfgguguacasusa | 542 | VPusAfsuguAfcAfCfcuugAfcAfuagagsgsa | 677 |
| AD-1622380 | gsuscaa(Ghd)GfuGfUfAfcauguaccsasa | 543 | VPusUfsgguAfcAfUfguacAfcCfuugacsasu | 678 |
| AD-1622289 | csgscca(Chd)UfuCfAfCfcaaggccasasa | 544 | VPusUfsuggCfcUfUfggugAfaGfuggcgsgsg | 679 |
| AD-1622388 | usascca(Ghd)CfuCfUfUfccgcagcususa | 545 | VPusAfsagcUfgCfGfgaagAfgCfugguascsa | 680 |
| AD-1622396 | csusucc(Ghd)CfaGfCfUfuggccuacsasa | 546 | VPusUfsguaGfgCfCfaagcUfgCfggaagsasg | 681 |
| AD-1622460 | gsgscgu(Ghd)UfgUfCfAfccgcgacasusa | 547 | VPusAfsuguCfgCfGfgugaCfaCfacgccscsu | 682 |
| AD-1622344 | gsusgua(Chd)AfuGfUfAfccagcucususa | 548 | VPusAfsagaGfcUfGfguacAfuGfuacacscsu | 683 |
| AD-1622466 | usgsuca(Chd)CfgCfGfAfcaucaagcscsa | 549 | VPusGfsgcuUfgAfUfgucgCfgGfugacascsa | 684 |
| AD-1622399 | ususggc(Chd)UfaCfAfUfccacucccsasa | 550 | VPusUfsgggAfgUfGfgaugUfaGfgccaasgsc | 685 |
| AD-1622489 | csasgug(Chd)AfaAfGfCfaguuggucscsa | 551 | VPusGfsgacCfaAfCfugcuUfuGfcacugscsc | 686 |
| AD-1622402 | ascsccu(Ghd)AfcAfCfUfgcuguccuscsa | 552 | VPusGfsaggAfcAfGfcaguGfuCfaggguscsc | 687 |
| AD-1622409 | csascug(Chd)UfgUfCfCfucaagcucsusa | 553 | VPusAfsgagCfuUfGfaggaCfaGfcagugsusc | 688 |
| AD-1622496 | gsasgcc(Chd)AfaUfGfUfcuccuacasusa | 554 | VPusAfsuguAfgGfAfgacaUfuGfggcucscsc | 689 |
| AD-1622415 | usgsucc(Uhd)CfaAfGfCfucugcgaususa | 555 | VPusAfsaucGfcAfGfagcuUfgAfggacasgsc | 154 |
| AD-1622502 | asasugu(Chd)UfcCfUfAfcaucuguuscsa | 556 | VPusGfsaacAfgAfUfguagGfaGfacauusgsg | 690 |
| AD-1622422 | asasgcu(Chd)UfgCfGfAfuuuuggcasgsa | 557 | VPusCfsugcCfaAfAfaucgCfaGfagcuusgsa | 158 |
| AD-1622511 | usascau(Chd)UfgUfUfCfucgcuacusasa | 558 | VPusUfsaguAfgCfGfagaaCfaGfauguasgsg | 691 |
| AD-1622428 | usgscga(Uhd)UfuUfGfGfcagugcaasasa | 559 | VPusUfsuugCfaCfUfgccaAfaAfucgcasgsa | 692 |
| AD-1622518 | gsusucu(Chd)GfcUfAfCfuaccgggcscsa | 560 | VPusGfsgccCfgGfUfaguaGfcGfagaacsasg | 693 |
| AD-1622522 | asgscuc(Ahd)UfcUfUfUfggagccacsusa | 561 | VPusAfsgugGfcUfCfcaaaGfaUfgagcuscsu | 694 |
| AD-1622528 | uscsuuu(Ghd)GfaGfCfCfacugauuascsa | 562 | VPusGfsuaaUfcAfGfuggcUfcCfaaagasusg | 695 |
| AD-1622532 | gsasgcc(Ahd)CfuGfAfUfuacaccucsasa | 563 | VPusUfsgagGfuGfUfaaucAfgUfggcucscsa | 696 |
| AD-1622539 | usgsauu(Ahd)CfaCfCfUfcauccaucsgsa | 564 | VPusCfsgauGfgAfUfgaggUfgUfaaucasgsu | 697 |
| AD-1622545 | csasccu(Chd)AfuCfCfAfucgauguususa | 565 | VPusAfsaacAfuCfGfauggAfuGfaggugsusa | 698 |
| AD-1622551 | asuscca(Uhd)CfgAfUfGfuuuggucasgsa | 566 | VPusCfsugaCfcAfAfacauCfgAfuggausgsa | 699 |
| AD-1622570 | gscsugg(Chd)UfgUfGfUfacuggcagsasa | 567 | VPusUfscugCfcAfGfuacaCfaGfccagcsusg | 700 |
| AD-1622580 | usascug(Ghd)CfaGfAfGfcuccucuusgsa | 568 | VPusCfsaagAfgGfAfgcucUfgCfcaguascsa | 701 |
| AD-1622596 | csusugg(Ghd)CfcAfGfCfccaucuucscsa | 569 | VPusGfsgaaGfaUfGfggcuGfgCfccaagsasg | 702 |
| AD-1622609 | csasgcu(Ghd)GfuGfGfAfgaucaucasasa | 570 | VPusUfsugaUfgAfUfcuccAfcCfagcugsgsu | 703 |
| AD-1622615 | gsusgga(Ghd)AfuCfAfUfcaaggugcsusa | 571 | VPusAfsgcaCfcUfUfgaugAfuCfuccacscsa | 704 |
| AD-1622627 | asasggu(Ghd)CfuGfGfGfaacaccaascsa | 572 | VPusGfsuugGfuGfUfucccAfgCfaccuusgsa | 705 |
| AD-1622634 | usgsgga(Ahd)CfaCfCfAfacccgggasasa | 573 | VPusUfsuccCfgGfGfuuggUfgUfucccasgsc | 706 |
| AD-1622645 | cscsaac(Chd)CfgGfGfAfacaaauccsgsa | 574 | VPusCfsggaUfuUfGfuuccCfgGfguuggsusg | 707 |
| AD-1622651 | csgsgga(Ahd)CfaAfAfUfccgagagasusa | 575 | VPusAfsucuCfuCfGfgauuUfgUfucccgsgsg | 708 |
| AD-1622659 | ascsacg(Ghd)AfgUfUfCfaaguucccsusa | 576 | VPusAfsgggAfaCfUfugaaCfuCfcgugusasg | 709 |
| AD-1622666 | gsusuca(Ahd)GfuUfCfCfcucagauusasa | 577 | VPusUfsaauCfuGfAfgggaAfcUfugaacsusc | 710 |
| AD-1622672 | gsusucc(Chd)UfcAfGfAfuuaaagcuscsa | 578 | VPusGfsagcUfuUfAfaucuGfaGfggaacsusu | 711 |
| AD-1622676 | csusgga(Chd)AfaAfGfGfuguucaaasusa | 579 | VPusAfsuuuGfaAfCfaccuUfuGfuccagsgsg | 712 |
| AD-1622682 | asasagg(Uhd)GfuUfCfAfaaucucgasasa | 580 | VPusUfsucgAfgAfUfuugaAfcAfccuuusgsu | 713 |
| AD-1622688 | gsusuca(Ahd)AfuCfUfCfgaacgccgscsa | 581 | VPusGfscggCfgUfUfcgagAfuUfugaacsasc | 714 |
| AD-1622706 | asgsgcc(Ahd)UfcGfCfGfcucugcucsusa | 582 | VPusAfsgagCfaGfAfgcgcGfaUfggccuscsu | 715 |
| AD-1622712 | uscsgcg(Chd)UfcUfGfCfucuagccusgsa | 583 | VPusCfsaggCfuAfGfagcaGfaGfcgcgasusg | 716 |
| AD-1622723 | uscsuag(Chd)CfuGfCfUfggaguacascsa | 584 | VPusGfsuguAfcUfCfcagcAfgGfcuagasgsc | 717 |
| AD-1622737 | gsusgcg(Chd)AfcAfGfCfuucuuugasusa | 585 | VPusAfsucaAfaGfAfagcuGfuGfcgcacsasg | 718 |
| AD-1622743 | ascsagc(Uhd)UfcUfUfUfgaugaacusgsa | 586 | VPusCfsaguUfcAfUfcaaaGfaAfgcugusgsc | 719 |
| AD-1622751 | ususuga(Uhd)GfaAfCfUfgcgaugucsusa | 587 | VPusAfsgacAfuCfGfcaguUfcAfucaaasgsa | 720 |
| AD-1622757 | gsasacu(Ghd)CfgAfUfGfucugggaascsa | 588 | VPusGfsuucCfcAfGfacauCfgCfaguucsasu | 721 |
| AD-1622763 | csgsaug(Uhd)CfuGfGfGfaacccagcsusa | 589 | VPusAfsgcuGfgGfUfucccAfgAfcaucgscsa | 722 |
| AD-1622775 | ascscca(Ghd)CfuGfCfCfuaacaaccsgsa | 590 | VPusCfsgguUfgUfUfaggcAfgCfugggususc | 723 |
| AD-1622782 | usgsccu(Ahd)AfcAfAfCfcgcccacususa | 591 | VPusAfsaguGfgGfCfgguuGfuUfaggcasgsc | 724 |
| AD-1622785 | csuscuc(Uhd)UfcAfAfCfuucagugcsusa | 592 | VPusAfsgcaCfuGfAfaguuGfaAfgagagsgsg | 725 |
| AD-1622801 | csasacu(Uhd)CfaGfUfGfcuggugaascsa | 593 | VPusGfsuucAfcCfAfgcacUfgAfaguugsasa | 726 |
| AD-1622808 | asgsugc(Uhd)GfgUfGfAfacucuccasusa | 594 | VPusAfsuggAfgAfGfuucaCfcAfgcacusgsa | 727 |
| AD-1622814 | gsgsuga(Ahd)CfuCfUfCfcauccaacscsa | 595 | VPusGfsguuGfgAfUfggagAfgUfucaccsasg | 728 |
| AD-1622823 | uscscau(Chd)CfaAfCfCfgucucucasasa | 596 | VPusUfsugaGfaGfAfcgguUfgGfauggasgsa | 729 |
| AD-1622829 | csasacc(Ghd)UfcUfCfUfcaacgccasusa | 597 | VPusAfsuggCfgUfUfgagaGfaCfgguugsgsa | 730 |
| AD-1622835 | uscsucu(Chd)AfaCfGfCfcauucucasusa | 598 | VPusAfsugaGfaAfUfggcgUfuGfagagascsg | 731 |
| AD-1622842 | ascsgcc(Ahd)UfuCfUfCfaucccuccsusa | 599 | VPusAfsggaGfgGfAfugagAfaUfggcgususg | 732 |
| AD-1622851 | gsusccu(Chd)AfcAfAfGfcuuuaacusgsa | 600 | VPusCfsaguUfaAfAfgcuuGfuGfaggacsgsg | 733 |
| AD-1622791 | uscsuca(Uhd)CfcCfUfCfcucacuugsasa | 601 | VPusUfscaaGfuGfAfggagGfgAfugagasasu | 734 |
| AD-1622857 | ascsaag(Chd)UfuUfAfAfcugagacuscsa | 602 | VPusGfsaguCfuCfAfguuaAfaGfcuugusgsa | 735 |
| AD-1622863 | ususuaa(Chd)UfgAfGfAfcuccgaccsasa | 603 | VPusUfsgguCfgGfAfgucuCfaGfuuaaasgsc | 736 |
| AD-1622880 | cscsagc(Uhd)CfaGfAfCfuggcagucsgsa | 604 | VPusCfsgacUfgCfCfagucUfgAfgcuggsusc | 737 |
| AD-1622891 | usgsgca(Ghd)UfcGfAfCfcgaugccascsa | 605 | VPusGfsuggCfaUfCfggucGfaCfugccasgsu | 738 |
| AD-1622910 | uscsgac(Chd)GfaUfGfCfcacaccuascsa | 606 | VPusGfsuagGfuGfUfggcaUfcGfgucgascsu | 739 |
| AD-1622917 | asusgcc(Ahd)CfaCfCfUfacccucacsusa | 607 | VPusAfsgugAfgGfGfuaggUfgUfggcauscsg | 740 |
| AD-1622924 | ascscua(Chd)CfcUfCfAfcuaacuccsusa | 608 | VPusAfsggaGfuUfAfgugaGfgGfuaggusgsu | 741 |
| AD-1622930 | cscsuca(Chd)UfaAfCfUfccuccugasgsa | 609 | VPusCfsucaGfgAfGfgaguUfaGfugaggsgsu | 742 |
| AD-1622935 | csascca(Ahd)GfcAfCfCfcuuccacususa | 610 | VPusAfsaguGfgAfAfggguGfcUfuggugsgsg | 743 |
| AD-1622943 | ascsccu(Uhd)CfcAfCfUfuccaucugsgsa | 611 | VPusCfscagAfuGfGfaaguGfgAfagggusgsc | 744 |
| AD-1622952 | cscsaua(Ghd)CfcCfAfUfcaagcuccsusa | 612 | VPusAfsggaGfcUfUfgaugGfgCfuauggscsc | 745 |
| AD-1622963 | gscsaga(Ghd)GfuAfAfAfugagucccsusa | 613 | VPusAfsgggAfcUfCfauuuAfcCfucugescsc | 746 |
| AD-1622897 | cscscau(Chd)AfaGfCfUfccugcccusgsa | 614 | VPusCfsaggGfcAfGfgagcUfuGfaugggscsu | 747 |
| AD-1622977 | uscsccu(Chd)CfcUfCfAfccagccucsasa | 615 | VPusUfsgagGfcUfGfgugaGfgGfagggascsu | 748 |
| AD-1622980 | csusgug(Ghd)UfgGfGfCfuuuuuaagsasa | 616 | VPusUfscuuAfaAfAfagccCfaCfcacagsgsg | 749 |
| AD-1622986 | usgsggc(Uhd)UfuUfUfAfagaggauususa | 617 | VPusAfsaauCfcUfCfuuaaAfaAfgcccascsc | 750 |
| AD-1622994 | usasaga(Ghd)GfaUfUfUfuaacuggususa | 618 | VPusAfsaccAfgUfUfaaaaUfcCfucuuasasa | 751 |
| AD-1622999 | asgsgga(Ahd)GfaGfAfAfggacagggsusa | 619 | VPusAfscccUfgUfCfcuucUfcUfucccuscsc | 752 |
| AD-1623019 | cscsugu(Ghd)UfcCfCfUfuguaaauasgsa | 620 | VPusCfsuauUfuAfCfaaggGfaCfacaggsasg | 753 |
| AD-1623039 | uscsucc(Uhd)CfuUfCfCfcuucccugsgsa | 621 | VPusCfscagGfgAfAfgggaAfgAfggagascsg | 754 |
| AD-1623042 | csgsggu(Ghd)UfaAfAfUfagauuguusasa | 622 | VPusUfsaacAfaUfCfuauuUfaCfacccgsgsg | 755 |
| AD-1623013 | ususgua(Ahd)AfuAfGfAfaccagcccsasa | 623 | VPusUfsgggCfuGfGfuucuAfuUfuacaasgsg | 756 |
| AD-1623047 | csusuaa(Ahd)GfaAfAfAfcgucgauuscsa | 624 | VPusGfsaauCfgAfCfguuuUfcUfuuaagsasa | 757 |
| AD-1623053 | gsasaaa(Chd)GfuCfGfAfuucgcaccsgsa | 625 | VPusCfsgguGfcGfAfaucgAfcGfuuuucsusu | 758 |
| AD-1623059 | gsuscga(Uhd)UfcGfCfAfccguccaascsa | 626 | VPusGfsuugGfaCfGfgugcGfaAfucgacsgsu | 759 |
| AD-1623065 | uscsgca(Chd)CfgUfCfCfaaccuggcscsa | 627 | VPusGfsgccAfgGfUfuggaCfgGfugcgasasu | 760 |
| AD-1623066 | csasagg(Uhd)CfuAfCfUfcccuccucsasa | 628 | VPusUfsgagGfaGfGfgaguAfgAfccuugsgsg | 761 |
| AD-1623104 | gscsucc(Uhd)GfaUfGfUfcuuaguuuscsa | 629 | VPusGfsaaaCfuAfAfgacaUfcAfggagcsusc | 762 |
| AD-1623111 | asusguc(Uhd)UfaGfUfUfuccacagusasa | 630 | VPusUfsacuGfuGfGfaaacUfaAfgacauscsa | 763 |
| AD-1623117 | cscsugu(Ghd)UfaCfAfGfaccuccgususa | 631 | VPusAfsacgGfaGfGfucugUfaCfacaggscsa | 764 |
| AD-1623124 | ascsaga(Chd)CfuCfCfGfuucaauaasasa | 632 | VPusUfsuuaUfuGfAfacggAfgGfucugusasc | 765 |
| AD-1623130 | csusccg(Uhd)UfcAfAfUfaaauuauusgsa | 633 | VPusCfsaauAfaUfUfuauuGfaAfcggagsgsu | 766 |
| AD-1623071 | usasguu(Uhd)CfcAfCfAfguaagguususa | 634 | VPusAfsaacCfuUfAfcuguGfgAfaacuasasg | 767 |
| AD-1623077 | cscsaca(Ghd)UfaAfGfGfuuugccugsusa | 635 | VPusAfscagGfcAfAfaccuUfaCfuguggsasa | 768 |
| AD-1623084 | asasggu(Uhd)UfgCfCfUfguguacagsasa | 636 | VPusUfscugUfaCfAfcaggCfaAfaccuusasc | 769 |
| AD-1623089 | uscsaau(Ahd)AfaUfUfAfuuggcaugsasa | 637 | VPusUfscauGfcCfAfauaaUfuUfauugasasc | 770 |
| | | | | SEQ |
| | | Duplex | mRNA target sequence | ID |
| | | Name | 5′ to 3′ | NO: |
| | | AD-1622033 | GGAAGGUGACCACAGUCGUAGCC | 771 |
| | | AD-1622039 | UGACCACAGUCGUAGCCACUCUA | 772 |
| | | AD-1622046 | AGUCGUAGCCACUCUAGGCCAAG | 773 |
| | | AD-1622072 | AGAGCGCUCCCAAGAAGUGGCUU | 774 |
| | | AD-1622078 | CUCCCAAGAAGUGGCUUACACGG | 775 |
| | | AD-1622017 | ACAGCGGGAAGGUGACCACAGUC | 776 |
| | | AD-1622088 | GUGGCUUACACGGACAUCAAAGU | 777 |
| | | AD-1622098 | CGGACAUCAAAGUGAUUGGCAAU | 778 |
| | | AD-1622108 | AGUGAUUGGCAAUGGCUCAUUUG | 779 |
| | | AD-1622137 | CAGAGACCAGGGAACUAGUCGCC | 780 |
| | | AD-1622143 | CCAGGGAACUAGUCGCCAUCAAG | 781 |
| | | AD-1622149 | AACUAGUCGCCAUCAAGAAGGUU | 782 |
| | | AD-1622155 | UCGCCAUCAAGAAGGUUCUCCAG | 783 |
| | | AD-1622161 | UCAAGAAGGUUCUCCAGGACAAG | 784 |
| | | AD-1622187 | CUCCAGGACAAGAGGUUCAAGAA | 785 |
| | | AD-1622197 | AGAGGUUCAAGAACCGAGAGCUG | 786 |
| | | AD-1622203 | UCAAGAACCGAGAGCUGCAGAUC | 787 |
| | | AD-1622209 | ACCGAGAGCUGCAGAUCAUGCGU | 788 |
| | | AD-1622215 | AGCUGCAGAUCAUGCGUAAGCUG | 789 |
| | | AD-1622223 | AUCAUGCGUAAGCUGGACCACUG | 790 |
| | | AD-1622226 | CACUGCAAUAUUGUGAGGCUGAG | 791 |
| | | AD-1622235 | AUUGUGAGGCUGAGAUACUUUUU | 792 |
| | | AD-1622241 | AGGCUGAGAUACUUUUUCUACUC | 793 |
| | | AD-1622247 | AGAUACUUUUUCUACUCCAGUGG | 794 |
| | | AD-1622253 | UUUUUCUACUCCAGUGGCGAGAA | 795 |
| | | AD-1622260 | ACUCCAGUGGCGAGAAGAAAGAC | 796 |
| | | AD-1622266 | GUGGCGAGAAGAAAGACGAGCUU | 797 |
| | | AD-1622272 | AGAAGAAAGACGAGCUUUACCUA | 798 |
| | | AD-1622179 | CUGGACCACUGCAAUAUUGUGAG | 799 |
| | | AD-1622278 | AAGACGAGCUUUACCUAAAUCUG | 800 |
| | | AD-1622284 | AGCUUUACCUAAAUCUGGUGCUG | 801 |
| | | AD-1622296 | ACCUAAAUCUGGUGCUGGAAUAU | 802 |
| | | AD-1622307 | GUGCUGGAAUAUGUGCCCGAGAC | 803 |
| | | AD-1622314 | AAUAUGUGCCCGAGACAGUGUAC | 804 |
| | | AD-1622320 | UGCCCGAGACAGUGUACCGGGUG | 805 |
| | | AD-1622337 | ACUUCACCAAGGCCAAGUUGACC | 806 |
| | | AD-1622352 | AAGGCCAAGUUGACCAUCCCUAU | 807 |
| | | AD-1622359 | AGUUGACCAUCCCUAUCCUCUAU | 808 |
| | | AD-1622365 | CCAUCCCUAUCCUCUAUGUCAAG | 809 |
| | | AD-1622374 | UCCUCUAUGUCAAGGUGUACAUG | 810 |
| | | AD-1622380 | AUGUCAAGGUGUACAUGUACCAG | 811 |
| | | AD-1622289 | CCCGCCACUUCACCAAGGCCAAG | 812 |
| | | AD-1622388 | UGUACCAGCUCUUCCGCAGCUUG | 813 |
| | | AD-1622396 | CUCUUCCGCAGCUUGGCCUACAU | 814 |
| | | AD-1622460 | AGGGCGUGUGUCACCGCGACAUC | 815 |
| | | AD-1622344 | AGGUGUACAUGUACCAGCUCUUC | 816 |
| | | AD-1622466 | UGUGUCACCGCGACAUCAAGCCC | 817 |
| | | AD-1622399 | GCUUGGCCUACAUCCACUCCCAG | 818 |
| | | AD-1622489 | GGCAGUGCAAAGCAGUUGGUCCG | 819 |
| | | AD-1622402 | GGACCCUGACACUGCUGUCCUCA | 820 |
| | | AD-1622409 | GACACUGCUGUCCUCAAGCUCUG | 821 |
| | | AD-1622496 | GGGAGCCCAAUGUCUCCUACAUC | 822 |
| | | AD-1622415 | GCUGUCCUCAAGCUCUGCGAUUU | 198 |
| | | AD-1622502 | CCAAUGUCUCCUACAUCUGUUCU | 823 |
| | | AD-1622422 | UCAAGCUCUGCGAUUUUGGCAGU | 202 |
| | | AD-1622511 | CCUACAUCUGUUCUCGCUACUAC | 824 |
| | | AD-1622428 | UCUGCGAUUUUGGCAGUGCAAAG | 825 |
| | | AD-1622518 | CUGUUCUCGCUACUACCGGGCCC | 826 |
| | | AD-1622522 | AGAGCUCAUCUUUGGAGCCACUG | 827 |
| | | AD-1622528 | CAUCUUUGGAGCCACUGAUUACA | 828 |
| | | AD-1622532 | UGGAGCCACUGAUUACACCUCAU | 829 |
| | | AD-1622539 | ACUGAUUACACCUCAUCCAUCGA | 830 |
| | | AD-1622545 | UACACCUCAUCCAUCGAUGUUUG | 831 |
| | | AD-1622551 | UCAUCCAUCGAUGUUUGGUCAGC | 832 |
| | | AD-1622570 | CAGCUGGCUGUGUACUGGCAGAG | 833 |
| | | AD-1622580 | UGUACUGGCAGAGCUCCUCUUGG | 834 |
| | | AD-1622596 | CUCUUGGGCCAGCCCAUCUUCCC | 835 |
| | | AD-1622609 | ACCAGCUGGUGGAGAUCAUCAAG | 836 |
| | | AD-1622615 | UGGUGGAGAUCAUCAAGGUGCUG | 837 |
| | | AD-1622627 | UCAAGGUGCUGGGAACACCAACC | 838 |
| | | AD-1622634 | GCUGGGAACACCAACCCGGGAAC | 839 |
| | | AD-1622645 | CACCAACCCGGGAACAAAUCCGA | 840 |
| | | AD-1622651 | CCCGGGAACAAAUCCGAGAGAUG | 841 |
| | | AD-1622659 | CUACACGGAGUUCAAGUUCCCUC | 842 |
| | | AD-1622666 | GAGUUCAAGUUCCCUCAGAUUAA | 843 |
| | | AD-1622672 | AAGUUCCCUCAGAUUAAAGCUCA | 844 |
| | | AD-1622676 | CCCUGGACAAAGGUGUUCAAAUC | 845 |
| | | AD-1622682 | ACAAAGGUGUUCAAAUCUCGAAC | 846 |
| | | AD-1622688 | GUGUUCAAAUCUCGAACGCCGCC | 847 |
| | | AD-1622706 | AGAGGCCAUCGCGCUCUGCUCUA | 848 |
| | | AD-1622712 | CAUCGCGCUCUGCUCUAGCCUGC | 849 |
| | | AD-1622723 | GCUCUAGCCUGCUGGAGUACACC | 850 |
| | | AD-1622737 | CUGUGCGCACAGCUUCUUUGAUG | 851 |
| | | AD-1622743 | GCACAGCUUCUUUGAUGAACUGC | 852 |
| | | AD-1622751 | UCUUUGAUGAACUGCGAUGUCUG | 853 |
| | | AD-1622757 | AUGAACUGCGAUGUCUGGGAACC | 854 |
| | | AD-1622763 | UGCGAUGUCUGGGAACCCAGCUG | 855 |
| | | AD-1622775 | GAACCCAGCUGCCUAACAACCGC | 856 |
| | | AD-1622782 | GCUGCCUAACAACCGCCCACUUC | 857 |
| | | AD-1622785 | CCCUCUCUUCAACUUCAGUGCUG | 858 |
| | | AD-1622801 | UUCAACUUCAGUGCUGGUGAACU | 859 |
| | | AD-1622808 | UCAGUGCUGGUGAACUCUCCAUC | 860 |
| | | AD-1622814 | CUGGUGAACUCUCCAUCCAACCG | 861 |
| | | AD-1622823 | UCUCCAUCCAACCGUCUCUCAAC | 862 |
| | | AD-1622829 | UCCAACCGUCUCUCAACGCCAUU | 863 |
| | | AD-1622835 | CGUCUCUCAACGCCAUUCUCAUC | 864 |
| | | AD-1622842 | CAACGCCAUUCUCAUCCCUCCUC | 865 |
| | | AD-1622851 | CCGUCCUCACAAGCUUUAACUGA | 866 |
| | | AD-1622791 | AUUCUCAUCCCUCCUCACUUGAG | 867 |
| | | AD-1622857 | UCACAAGCUUUAACUGAGACUCC | 868 |
| | | AD-1622863 | GCUUUAACUGAGACUCCGACCAG | 869 |
| | | AD-1622880 | GACCAGCUCAGACUGGCAGUCGA | 870 |
| | | AD-1622891 | ACUGGCAGUCGACCGAUGCCACA | 871 |
| | | AD-1622910 | AGUCGACCGAUGCCACACCUACC | 872 |
| | | AD-1622917 | CGAUGCCACACCUACCCUCACUA | 873 |
| | | AD-1622924 | ACACCUACCCUCACUAACUCCUC | 874 |
| | | AD-1622930 | ACCCUCACUAACUCCUCCUGAGG | 875 |
| | | AD-1622935 | CCCACCAAGCACCCUUCCACUUC | 876 |
| | | AD-1622943 | GCACCCUUCCACUUCCAUCUGGG | 877 |
| | | AD-1622952 | GGCCAUAGCCCAUCAAGCUCCUG | 878 |
| | | AD-1622963 | GGGCAGAGGUAAAUGAGUCCCUG | 879 |
| | | AD-1622897 | AGCCCAUCAAGCUCCUGCCCUGG | 880 |
| | | AD-1622977 | AGUCCCUCCCUCACCAGCCUCAC | 881 |
| | | AD-1622980 | CCCUGUGGUGGGCUUUUUAAGAG | 882 |
| | | AD-1622986 | GGUGGGCUUUUUAAGAGGAUUUU | 883 |
| | | AD-1622994 | UUUAAGAGGAUUUUAACUGGUUG | 884 |
| | | AD-1622999 | GGAGGGAAGAGAAGGACAGGGUG | 885 |
| | | AD-1623019 | CUCCUGUGUCCCUUGUAAAUAGA | 886 |
| | | AD-1623039 | CGUCUCCUCUUCCCUUCCCUGGC | 887 |
| | | AD-1623042 | CCCGGGUGUAAAUAGAUUGUUAU | 888 |
| | | AD-1623013 | CCUUGUAAAUAGAACCAGCCCAG | 889 |
| | | AD-1623047 | UUCUUAAAGAAAACGUCGAUUCG | 890 |
| | | AD-1623053 | AAGAAAACGUCGAUUCGCACCGU | 891 |
| | | AD-1623059 | ACGUCGAUUCGCACCGUCCAACC | 892 |
| | | AD-1623065 | AUUCGCACCGUCCAACCUGGCCC | 893 |
| | | AD-1623066 | CCCAAGGUCUACUCCCUCCUCAC | 894 |
| | | AD-1623104 | GAGCUCCUGAUGUCUUAGUUUCC | 895 |
| | | AD-1623111 | UGAUGUCUUAGUUUCCACAGUAA | 896 |
| | | AD-1623117 | UGCCUGUGUACAGACCUCCGUUC | 897 |
| | | AD-1623124 | GUACAGACCUCCGUUCAAUAAAU | 898 |
| | | AD-1623130 | ACCUCCGUUCAAUAAAUUAUUGG | 899 |
| | | AD-1623071 | CUUAGUUUCCACAGUAAGGUUUG | 900 |
| | | AD-1623077 | UUCCACAGUAAGGUUUGCCUGUG | 901 |
| | | AD-1623084 | GUAAGGUUUGCCUGUGUACAGAC | 902 |
| | | AD-1623089 | GUUCAAUAAAUUAUUGGCAUGAA | 903 |

TABLE 10
Single Dose Screen in A549 Cells

| | GSK3A/gapdh | |
|---|---|---|
| | 10 nM | |
| | Average % | |
| | message | |
| Duplex Name | remaining | SD |
| AD-1623089.1 | 17.223 | 1.002 |
| AD-1623084.1 | 11.665 | 0.896 |
| AD-1623077.1 | 11.411 | 0.432 |
| AD-1623071.1 | 10.561 | 0.885 |
| AD-1623130.1 | 14.305 | 1.107 |
| AD-1623124.1 | 15.196 | 0.915 |
| AD-1623117.1 | 17.369 | 1.030 |
| AD-1623111.1 | 12.466 | 1.005 |
| AD-1623104.1 | 9.724 | 0.468 |
| AD-1623066.1 | 40.792 | 2.970 |
| AD-1623065.1 | 38.487 | 1.699 |
| AD-1623059.1 | 20.878 | 0.331 |
| AD-1623053.1 | 16.330 | 0.543 |
| AD-1623047.1 | 13.855 | 3.608 |
| AD-1623013.1 | 38.501 | 0.327 |
| AD-1623042.1 | 25.925 | 1.057 |
| AD-1623039.1 | 49.114 | 1.430 |
| AD-1623019.1 | 54.882 | 4.298 |
| AD-1622999.1 | 50.957 | 0.882 |
| AD-1622994.1 | 21.276 | 0.511 |
| AD-1622986.1 | 20.860 | 0.595 |
| AD-1622980.1 | 81.161 | 2.318 |
| AD-1622977.1 | 106.290 | 8.808 |
| AD-1622897.1 | 63.333 | 1.697 |
| AD-1622963.1 | 20.048 | 1.215 |
| AD-1622952.1 | 54.478 | 7.582 |
| AD-1622943.1 | 30.387 | 1.534 |
| AD-1622935.1 | 55.072 | 4.178 |
| AD-1622930.1 | 11.593 | 1.119 |
| AD-1622924.1 | 14.428 | 0.398 |
| AD-1622917.1 | 26.545 | 3.582 |
| AD-1622910.1 | 9.664 | 1.471 |
| AD-1622891.1 | 52.852 | 3.241 |
| AD-1622880.1 | 12.243 | 1.670 |
| AD-1622863.1 | 9.745 | 0.676 |
| AD-1622857.1 | 9.651 | 0.496 |
| AD-1622791.1 | 36.560 | 2.340 |
| AD-1622851.1 | 26.846 | 3.883 |
| AD-1622842.1 | 46.263 | 6.538 |
| AD-1622835.1 | 12.617 | 0.564 |
| AD-1622829.1 | 87.706 | 20.655 |
| AD-1622823.1 | 9.961 | 0.163 |
| AD-1622814.1 | 29.653 | 2.607 |
| AD-1622808.1 | 16.918 | 0.647 |
| AD-1622801.1 | 15.578 | 1.788 |
| AD-1622785.1 | 10.340 | 0.845 |
| AD-1622782.1 | 85.541 | 2.051 |
| AD-1622775.1 | 28.037 | 1.644 |
| AD-1622763.1 | 79.395 | 7.253 |
| AD-1622757.1 | 24.893 | 2.107 |
| AD-1622751.1 | 15.005 | 0.905 |
| AD-1622743.1 | 36.317 | 2.995 |
| AD-1622737.1 | 9.745 | 1.150 |
| AD-1622723.1 | 15.894 | 0.358 |
| AD-1622712.1 | 21.058 | 1.242 |
| AD-1622706.1 | 82.267 | 3.393 |
| AD-1622688.1 | 115.629 | 2.236 |
| AD-1622682.1 | 16.651 | 0.586 |
| AD-1622676.1 | 15.159 | 0.799 |
| AD-1622672.1 | 11.870 | 0.781 |
| AD-1622666.1 | 8.543 | 0.332 |
| AD-1622659.1 | 14.307 | 0.462 |
| AD-1622651.1 | 9.691 | 0.269 |
| AD-1622645.1 | 28.253 | 2.172 |
| AD-1622634.1 | 104.957 | 4.268 |
| AD-1622627.1 | 83.404 | 4.832 |
| AD-1622615.1 | 15.811 | 0.529 |
| AD-1622609.1 | 55.734 | 4.845 |
| AD-1622596.1 | 67.493 | 2.138 |
| AD-1622580.1 | 21.506 | 0.767 |
| AD-1622570.1 | 94.778 | 1.377 |
| AD-1622551.1 | 13.908 | 0.710 |
| AD-1622545.1 | 8.973 | 0.207 |
| AD-1622539.1 | 30.587 | 1.053 |
| AD-1622532.1 | 13.021 | 0.322 |
| AD-1622528.1 | 9.547 | 0.748 |
| AD-1622518.1 | 91.970 | 2.600 |
| AD-1622522.1 | 102.863 | 10.762 |
| AD-1622428.1 | 30.516 | 1.706 |
| AD-1622511.1 | 12.061 | 0.565 |
| AD-1622422.1 | 61.164 | 3.090 |
| AD-1622502.1 | 22.969 | 1.871 |
| AD-1622415.1 | 17.845 | 1.371 |
| AD-1622496.1 | 16.272 | 0.759 |
| AD-1622409.1 | 17.093 | 4.311 |
| AD-1622402.1 | 27.334 | 1.604 |
| AD-1622489.1 | 28.289 | 1.456 |
| AD-1622399.1 | 44.886 | 2.747 |
| AD-1622466.1 | 91.282 | 12.347 |
| AD-1622344.1 | 35.355 | 4.086 |
| AD-1622460.1 | 62.621 | 1.321 |
| AD-1622396.1 | 21.347 | 0.734 |
| AD-1622388.1 | 68.613 | 1.842 |
| AD-1622289.1 | 114.865 | 2.319 |
| AD-1622380.1 | 15.217 | 0.389 |
| AD-1622374.1 | 28.391 | 1.363 |
| AD-1622365.1 | 68.501 | 3.772 |
| AD-1622359.1 | 15.654 | 0.878 |
| AD-1622352.1 | 27.628 | 1.178 |
| AD-1622337.1 | 10.168 | 1.747 |
| AD-1622320.1 | 85.391 | 7.636 |
| AD-1622314.1 | 33.433 | 3.100 |
| AD-1622307.1 | 100.825 | 8.031 |
| AD-1622296.1 | 74.448 | 3.488 |
| AD-1622284.1 | 7.701 | 2.458 |
| AD-1622278.1 | 10.204 | 1.058 |
| AD-1622179.1 | 14.332 | 3.052 |
| AD-1622272.1 | 11.425 | 1.574 |
| AD-1622266.1 | 24.926 | 2.962 |
| AD-1622260.1 | 23.369 | 1.135 |
| AD-1622253.1 | 57.902 | 2.731 |
| AD-1622247.1 | 29.111 | 3.572 |
| AD-1622241.1 | 9.837 | 0.760 |
| AD-1622235.1 | 48.949 | 2.182 |
| AD-1622226.1 | 12.996 | 1.536 |
| AD-1622223.1 | 36.690 | 10.017 |
| AD-1622215.1 | 14.225 | 1.236 |
| AD-1622209.1 | 22.577 | 1.384 |
| AD-1622203.1 | 51.591 | 3.120 |
| AD-1622197.1 | 19.216 | 2.035 |
| AD-1622187.1 | 17.475 | 2.717 |
| AD-1622161.1 | 43.955 | 6.956 |
| AD-1622155.1 | 18.610 | 1.938 |
| AD-1622149.1 | 66.734 | 9.164 |
| AD-1622143.1 | 38.542 | 7.987 |
| AD-1622137.1 | 43.488 | 1.933 |
| AD-1622108.1 | 47.030 | 18.430 |
| AD-1622098.1 | 17.050 | 1.361 |
| AD-1622088.1 | 14.186 | 2.102 |
| AD-1622017.1 | 59.956 | 2.374 |
| AD-1622078.1 | 19.638 | 1.321 |
| AD-1622072.1 | 73.801 | 11.170 |
| AD-1622046.1 | 93.087 | 2.219 |
| AD-1622039.1 | 68.990 | 4.053 |
| AD-1622033.1 | 114.596 | 15.438 |
| Positive control | 5.550 | 0.324 |

Informal Sequence Listing

<210> 1
<211> 2276
<212> DNA
<213> Mus musculus
<400> 1

| | |
|---|---|
| gtggtgacaa cgaagccgac ggcagaggga cttcatctcc cggcgtgccc cgcggcgggc | 60 |
| gctgggccgg agccggagcc cgaacggcgc ggcctggaag aggccggagc ccaggggagg | 120 |
| cggcggcaga ggcagcggcg ggggcagccc aggcagcccg agccccgcgg cctgggcctg | 180 |
| cgctcggcgc catgagcggc ggcgggcctt cgggaggcgg ccctgggggc tcgggccggg | 240 |
| cgcggaccag ctcgttcgcg gagccaggag gcggaggcgg aggtggtggc ggcggccccg | 300 |
| ggggctcggc ctctggccca ggaggcactg gcggcgggaa agcgtcagtc ggggctatgg | 360 |
| gtgggggcgt gggagcctcg agctccgggg gtggccccag cggcagcggc ggaggaggca | 420 |
| gcggtggccc cggcgcgggc actagcttcc cgccgccggg agtgaagctg ggccgtgaca | 480 |
| gcgggaaggt gaccacagtg gtagccactg taggccaagg cccagagcgt tcccaagaag | 540 |
| tggcttacac tgacatcaaa gtgattggta atggctcatt cggagtagta taccaggcac | 600 |
| ggctggcaga gacgagggaa ctggtggcca tcaagaaggt tcttcaggac aaaaggttca | 660 |
| agaaccgaga actgcagatt atgcgtaagc tggaccactg caatattgtg aggctgcggt | 720 |
| actttttcta ctccagtggg gagaagaagg acgagctgta tttgaatctg gtgctggagt | 780 |
| atgtgcccga gacggtgtac cgagtggccc gccacttcac caaggccaag ctgatcaccc | 840 |
| ctatcatcta catcaaggtg tacatgtacc agctcttccg gagcttggcc tacatccact | 900 |
| cccaaggtgt gtgtcaccgt gacatcaagc cccagaattt gcttgtggac cctgacactg | 960 |
| ctgtcctcaa gctctgcgat tttggcagtg caaagcagct ggttcggggg gagcccaatg | 1020 |
| tgtcctacat ctgctctcgg tactaccgtg ctccagaact catctttgga gccacagatt | 1080 |
| acacctcgtc catcgatgtg tggtcggctg gctgtgtact tgctgagcta cttctcggcc | 1140 |
| agcccatctt ccctggggac agtggggtgg accagcttgt ggagatcatc aaggtactag | 1200 |
| gaacgccaac cagggaacaa atccgagaga tgaaccctaa ctatacggag ttcaagttcc | 1260 |
| cccagatcaa agctcaccct tggacaaagg tgttcaaatc ttcaaagaca ccacctgagg | 1320 |
| ccattgcact ctgctctagc ctactggagt acacgccatc ctcaaggctc tccccactcg | 1380 |
| aggcttgtgc ccacagcttc ttcgatgaac tgcggagact cggagcccag ctccccaacg | 1440 |
| accgcccgct tccccccctg ttcaacttca gtcctggtga actgtccatc caaccatctc | 1500 |
| tcaatgccat tctcatccct cctcacttga ggtccccagc aggccctgct tctcccctca | 1560 |
| ccacttccta caacccatcc tcacaagctt taactgaagc tcagactggc caagattggc | 1620 |
| agccatctga tgccacaact gctaccctcg ctagctcttc ctgagggccc caccgactac | 1680 |
| ccctccacgt ccatctggga aggcccaagt ggcgctggga agggggccac agcccatcaa | 1740 |
| gctcctgccc tggctgggcc cctagactag agggcagagg taaatgaact acccccagca | 1800 |
| tctaggcctc cctcagcagc ctaacctctg tggtgggctt tttaaagagg attttaactg | 1860 |
| tttgtagggg aggggagaaa aggaaggacg gggtttgggg gtgtgaggac cttctacccc | 1920 |
| cttggtcccc tcccctcccc caggctacca ctccttccct ccccccctct cccaggtccc | 1980 |
| ttgtaaatag aaccagccca gcccatctct cgtcttccct tccctggccc cctgggtgta | 2040 |
| aatagattgt tataattttt tcttaaagaa aacgtcaatt cacaccattc aacttgcccc | 2100 |
| ccccagctgt accccttctt gtcctctgct cccaaggctt cctccctctc cccatcctgg | 2160 |
| aaggagggga gtagagagag tccctggtgt cttagtttcc acagtaaggt ttgcctgtgt | 2220 |
| acagacctct gttcaataaa ttattggcat gaaaccctta aaaaaaaaaa aaaaaa | 2276 |
| <210> 2 | |
| <211> 2276 | |
| <212> DNA | |
| <213> Mus musculus | |
| <400> 2 | |
| tttttttttt tttttttaag ggtttcatgc caataattta ttgaacagag gtctgtacac | 60 |
| aggcaaacct tactgtggaa actaagacac cagggactct ctctactccc ctccttccag | 120 |
| gatggggaga gggaggaagc cttgggagca gaggacaaga aggggtacag ctgggggggg | 180 |
| caagttgaat ggtgtgaatt gacgttttct ttaagaaaaa attataacaa tctatttaca | 240 |
| cccagggggc cagggaaggg aagacgagag atgggctggg ctggttctat ttacaaggga | 300 |
| cctgggagag ggggggaggg aaggagtggt agcctggggg aggggagggg accaaggggg | 360 |
| tagaaggtcc tcacaccccc aaaccccgtc cttccttttc tcccctcccc tacaaacagt | 420 |
| taaaatcctc tttaaaaagc ccaccacaga ggttaggctg ctgagggagg cctagatgct | 480 |
| gggggtagtt catttacctc tgccctctag tctaggggcc cagccagggc aggagcttga | 540 |
| tgggctgtgg cccccttccc agcgccactt gggccttccc agatggacgt ggaggggtag | 600 |
| tcggtggggc cctcaggaag agctagcgag ggtagcagtt gtggcatcag atggctgcca | 660 |
| atcttggcca gtctgagctt cagttaaagc ttgtgaggat gggttgtagg aagtggtgag | 720 |
| gggagaagca gggcctgctg gggacctcaa gtgaggaggg atgagaatgg cattgagaga | 780 |
| tggttggatg gacagttcac caggactgaa gttgaacagg gggggaagcg ggcggtcgtt | 840 |
| ggggagctgg gctccgagtc tccgcagttc atcgaagaag ctgtgggcac aagcctcgag | 900 |
| tggggagagc cttgaggatg gcgtgtactc cagtaggcta gagcagagtg caatggcctc | 960 |
| aggtggtgtc tttgaagatt tgaacacctt tgtccaaggg tgagctttga tctgggggaa | 1020 |
| cttgaactcc gtatagttag ggttcatctc tcggatttgt tccctggttg gcgttcctag | 1080 |
| taccttgatg atctccacaa gctggtccac cccactgtcc ccagggaaga tgggctggcc | 1140 |
| gagaagtagc tcagcaagta cacagccagc cgaccacaca tcgatggacg aggtgtaatc | 1200 |
| tgtggctcca aagatgagtt ctggagcacg gtagtaccga gagcagatgt aggacacatt | 1260 |
| gggctccccc cgaaccagct gctttgcact gccaaaatcg cagagcttga ggacagcagt | 1320 |
| gtcagggtcc acaagcaaat tctggggctt gatgtcacgg tgacacacac cttgggagtg | 1380 |
| gatgtaggcc aagctccgga agagctggta catgtacacc ttgatgtaga tgataggggt | 1440 |
| gatcagcttg gccttggtga agtggcgggc cactcggtac accgtctcgg gcacatactc | 1500 |
| cagcaccaga ttcaaataca gctcgtcctt cttctcccca ctggagtaga aaaagtaccg | 1560 |
| cagcctcaca atattgcagt ggtccagctt acgcataatc tgcagttctc ggttcttgaa | 1620 |
| ccttttgtcc tgaagaacct tcttgatggc caccagttcc ctcgtctctg ccagccgtgc | 1680 |
| ctggtatact actccgaatg agccattacc aatcactttg atgtcagtgt aagccacttc | 1740 |
| ttgggaacgc tctgggcctt ggcctacagt ggctaccact gtggtcacct tcccgctgtc | 1800 |
| acggcccagc ttcactcccg gcggcgggaa gctagtgccc gcgccggggc caccgctgcc | 1860 |
| tcctccgccg ctgccgctgg ggccaccccc ggagctcgag gctcccacgc ccccacccat | 1920 |
| agccccgact gacgctttcc cgccgccagt gcctcctggg ccagaggccg agcccccggg | 1980 |
| gccgccgcca ccacctccgc ctccgcctcc tggctccgcg aacgagctgg tccgcgcccg | 2040 |
| gcccgagccc ccagggccgc ctcccgaagg cccgccgccg ctcatggcgc cgagcgcagg | 2100 |
| cccaggccgc ggggctcggg ctgcctgggc tgcccccgcc gctgcctctg ccgccgcctc | 2160 |
| ccctgggctc cggcctcttc caggccgcgc cgttcgggct ccggctccgg cccagcgccc | 2220 |
| gccgcggggc acgccgggag atgaagtccc tctgccgtcg gcttcgttgt caccac | 2276 |
| <210> 3 | |
| <211> 2193 | |
| <212> DNA | |
| <213> Homo sapiens | |
| <400> 3 | |
| gctgggccgg agccggagcc caagccagag cggcgcggcc tggaagaggc cagggcccgg | 60 |
| gggaggcggc ggcagcggcg gcggctgggg cagcccgggc agcccgagcc ccgcagcctg | 120 |
| ggcctgtgct cggcgccatg agcggcggcg ggccttcggg aggcggccct gggggctcgg | 180 |
| gcagggcgcg gactagctcg ttcgcggagc ccggcggcgg aggcggagga ggcggcggcg | 240 |
| gccccggagg ctcggcctcc ggcccaggcg gcaccggcgg cggaaaggca tctgtcgggg | 300 |
| ccatgggtgg gggcgtcggg gcctcgagct ccgggggtgg acccggcggc agcggcggag | 360 |
| gaggcagcgg aggccccggc gcaggcacta gcttcccgcc gcccggggtg aagctgggcc | 420 |
| gtgacagcgg gaaggtgacc acagtcgtag ccactctagg ccaaggccca gagcgctccc | 480 |
| aagaagtggc ttacacggac atcaaagtga ttggcaatgg ctcatttggg gtcgtgtacc | 540 |
| aggcacggct ggcagagacc agggaactag tcgccatcaa gaaggttctc caggacaaga | 600 |
| ggttcaagaa ccgagagctg cagatcatgc gtaagctgga ccactgcaat attgtgaggc | 660 |
| tgagatactt tttctactcc agtggcgaga agaaagacga gctttaccta aatctggtgc | 720 |
| tggaatatgt gcccgagaca gtgtaccggg tggcccgcca cttcaccaag gccaagttga | 780 |
| ccatccctat cctctatgtc aaggtgtaca tgtaccagct cttccgcagc ttggcctaca | 840 |
| tccactccca gggcgtgtgt caccgcgaca tcaagcccca gaacctgctg gtggaccctg | 900 |
| acactgctgt cctcaagctc tgcgattttg gcagtgcaaa gcagttggtc cgaggggagc | 960 |
| ccaatgtctc ctacatctgt tctcgctact accgggcccc agagctcatc tttggagcca | 1020 |
| ctgattacac ctcatccatc gatgtttggt cagctggctg tgtactggca gagctcctct | 1080 |
| tgggccagcc catcttccct ggggacagtg gggtggacca gctggtggag atcatcaagg | 1140 |
| tgctgggaac accaacccgg gaacaaatcc gagagatgaa ccccaactac acggagttca | 1200 |
| agttccctca gattaaagct cacccctgga caaaggtgtt caaatctcga acgccgccag | 1260 |
| aggccatcgc gctctgctct agcctgctgg agtacacccc atcctcaagg ctctccccac | 1320 |
| tagaggcctg tgcgcacagc ttctttgatg aactgcgatg tctgggaacc cagctgccta | 1380 |
| acaaccgccc acttccccct ctcttcaact tcagtgctgg tgaactctcc atccaaccgt | 1440 |
| ctctcaacgc cattctcatc cctcctcact tgaggtcccc agcgggcact accaccctca | 1500 |
| ccccgtcctc acaagcttta actgagactc cgaccagctc agactggcag tcgaccgatg | 1560 |
| ccacacctac cctcactaac tcctcctgag ggccccacca agcacccttc cacttccatc | 1620 |
| tgggagcccc aagaggggct gggaaggggg gccatagccc atcaagctcc tgccctggct | 1680 |
| gggcccctag actagagggc agaggtaaat gagtccctgt ccccacctcc agtccctccc | 1740 |
| tcaccagcct cacccctgtg gtgggctttt taagaggatt ttaactggtt gtggggaggg | 1800 |
| aagagaagga cagggtgttg gggggatgag gacctcctac ccccttggcc ccctcccctc | 1860 |
| ccccagacct ccacctcctc cagaccccct cccctcctgt gtcccttgta aatagaacca | 1920 |
| gcccagcccg tctcctcttc ccttccctgg cccccgggtg taaatagatt gttataattt | 1980 |
| ttttcttaaa gaaaacgtcg attcgcaccg tccaacctgg ccccgcccct cctacagctg | 2040 |
| taactcccct cctgtcctct gcccccaagg tctactccct cctcacccca ccctggaggg | 2100 |
| ccaggggagt ggagagagct cctgatgtct tagtttccac agtaaggttt gcctgtgtac | 2160 |
| agacctccgt tcaataaatt attggcatga aaa | 2193 |
| <210> 4 | |
| <211> 2193 | |
| <212> DNA | |
| <213> Homo sapiens | |
| <400> 4 | |
| ttttcatgcc aataatttat tgaacggagg tctgtacaca ggcaaacctt actgtggaaa | 60 |
| ctaagacatc aggagctctc tccactcccc tggccctcca gggtggggtg aggagggagt | 120 |
| agaccttggg ggcagaggac aggaggggag ttacagctgt aggaggggcg gggccaggtt | 180 |
| ggacggtgcg aatcgacgtt ttctttaaga aaaaaattat aacaatctat ttacacccgg | 240 |
| gggccaggga agggaagagg agacgggctg ggctggttct atttacaagg gacacaggag | 300 |
| gggagggggt ctggaggagg tggaggtctg ggggagggga gggggccaag ggggtaggag | 360 |
| gtcctcatcc ccccaacacc ctgtccttct cttccctccc cacaaccagt taaaatcctc | 420 |
| ttaaaaagcc caccacaggg gtgaggctgg tgagggaggg actggaggtg gggacaggga | 480 |
| ctcatttacc tctgccctct agtctagggg cccagccagg gcaggagctt gatgggctat | 540 |
| ggcccccctt cccagcccct cttggggctc ccagatggaa gtggaagggt gcttggtggg | 600 |
| gccctcagga ggagttagtg agggtaggtg tggcatcggt cgactgccag tctgagctgg | 660 |
| tcggagtctc agttaaagct tgtgaggacg gggtgagggt ggtagtgccc gctggggacc | 720 |
| tcaagtgagg agggatgaga atggcgttga gagacggttg gatggagagt tcaccagcac | 780 |
| tgaagttgaa gagaggggga agtgggcggt tgttaggcag ctgggttccc agacatcgca | 840 |
| gttcatcaaa gaagctgtgc gcacaggcct ctagtgggga gagccttgag gatggggtgt | 900 |
| actccagcag gctagagcag agcgcgatgg cctctggcgg cgttcgagat ttgaacacct | 960 |
| ttgtccaggg gtgagcttta atctgaggga acttgaactc cgtgtagttg gggttcatct | 1020 |
| ctcggatttg ttcccgggtt ggtgttccca gcaccttgat gatctccacc agctggtcca | 1080 |
| ccccactgtc cccagggaag atgggctggc ccaagaggag ctctgccagt acacagccag | 1140 |
| ctgaccaaac atcgatggat gaggtgtaat cagtggctcc aaagatgagc tctggggccc | 1200 |
| ggtagtagcg agaacagatg taggagacat tgggctcccc tcggaccaac tgctttgcac | 1260 |
| tgccaaaatc gcagagcttg aggacagcag tgtcagggtc caccagcagg ttctggggct | 1320 |
| tgatgtcgcg gtgacacacg ccctgggagt ggatgtaggc caagctgcgg aagagctggt | 1380 |
| acatgtacac cttgacatag aggataggga tggtcaactt ggccttggtg aagtggcggg | 1440 |
| ccacccggta cactgtctcg ggcacatatt ccagcaccag atttaggtaa agctcgtctt | 1500 |
| tcttctcgcc actggagtag aaaaagtatc tcagcctcac aatattgcag tggtccagct | 1560 |
| tacgcatgat ctgcagctct cggttcttga acctcttgtc ctggagaacc ttcttgatgg | 1620 |
| cgactagttc cctggtctct gccagccgtg cctggtacac gaccccaaat gagccattgc | 1680 |
| caatcacttt gatgtccgtg taagccactt cttgggagcg ctctgggcct tggcctagag | 1740 |
| tggctacgac tgtggtcacc ttcccgctgt cacggcccag cttcaccccg ggcggcggga | 1800 |
| agctagtgcc tgcgccgggg cctccgctgc ctcctccgcc gctgccgccg ggtccacccc | 1860 |
| cggagctcga ggccccgacg cccccaccca tggccccgac agatgccttt ccgccgccgg | 1920 |
| tgccgcctgg gccggaggcc gagcctccgg ggccgccgcc gcctcctccg cctccgccgc | 1980 |
| cgggctccgc gaacgagcta gtccgcgccc tgcccgagcc cccagggccg cctcccgaag | 2040 |
| gcccgccgcc gctcatggcg ccgagcacag gcccaggctg cggggctcgg gctgcccggg | 2100 |
| ctgccccagc cgccgccgct gccgccgcct cccccgggcc ctggcctctt ccaggccgcg | 2160 |
| ccgctctggc ttgggctccg gctccggccc agc | 2193 |
| <210> 5 | |
| <211> 2686 | |
| <212> DNA | |
| <213> Macaca fascicularis | |
| <400> 5 | |
| catctccgga attgcagtat ccacttggga cttaagaaac cacctgggac tccatttccc | 60 |
| ggcgtgcttt aagaatcgct ttacacctgc aatgcggtga gggcgtggcg atgactccat | 120 |
| ttcccggctt gcttcacggc ccgagatccg caggttcacg cgcgccgact caatttccca | 180 |
| gagcgcaccg ggctctggga cgcacacaca gccaataaac tgagtgagtg gactctgttt | 240 |
| cccagcgtgc atcaggctct ctgcttcccg aaatacttca gggctccccg tcgtaccgtc | 300 |
| ggcagacaga ttaccctgga ctccatttcc cgatgtacag cgcgacccgt cattcccgcg | 360 |
| gtctactctg aggcttttgt ggacttcatt tcccggcgtg ccacggggct ctctgtaagg | 420 |
| gccgagggcg gcgacggcgg cgcggacgac agccggactg catctcccgg cgtgccccgc | 480 |
| ggcgggcgct gggccggagc cggagcccaa acccgagcgg cgcggcctgg aagaggccag | 540 |
| agcccggggg aggcggcggc agcggcggcg gctggggcag cccggggagc ccgagccccg | 600 |
| cggcctgggc ctgtgctcgg cgccatgagc ggcggcgggc cttcgggagg cggccctggg | 660 |
| ggctcgggca gggcgcggac cagctcgttc gcggagccag gcggcggagg cggaggcggc | 720 |
| ggcggcggcc ccggaggctc ggcctccggc ccaggcggca ccggcggcgg aaaggcatct | 780 |
| gtcggggcca tgggtggggg cgtcggggcc tcgagctccg ggggtggacc cggcggcagc | 840 |
| ggcggcggag gcagcggagg ccccggcgca ggcactagct tcccgccgcc cggggtgaag | 900 |
| ctgggccgtg acagcgggaa ggtgaccaca gtggtagcca ctctaggcca aggtccagag | 960 |
| cgctcccaag aggtggctta cacagacatc aaagtgattg gcaatggctc atttggggtc | 1020 |
| gtgtaccagg cacggctggc agagaccagg gaactggtcg ccatcaagaa ggttctccag | 1080 |
| gacaagaggt tcaagaaccg agagctgcag atcatgcgta agctggacca ctgcaatatt | 1140 |
| gtgaggctga gatacttttt ctactccagt ggggagaaga aagatgagct ttacctaaat | 1200 |
| ctggtgctgg aatatgtgcc cgagacagtg taccgggtgg cccgccactt caccaaggcc | 1260 |
| aagttgacca tccctatcct ctatgtcaag gtgtacatgt accagctctt ccgcagcttg | 1320 |
| gcctacatcc actcccaggg cgtgtgtcac cgtgacatca agccccagaa cctgctggtg | 1380 |
| gaccctgaca ctgctgtcct caagctctgc gattttggca gtgcgaagca gttggtccga | 1440 |
| ggggagccca atgtctccta catctgttct cgctactacc gggccccaga gctcatcttt | 1500 |
| ggagccactg attacacctc atccatcgat gtttggtcag ctggctgcgt actggcggag | 1560 |
| ctcctcctgg gccagcccat cttccctggg gacagtgggg tggaccagct ggtggagatc | 1620 |
| atcaaggtgc tgggaacacc aacccgggaa caaatccgag agatgaaccc caactacacg | 1680 |
| gagttcaagt tccctcagat taaagctcac ccctggacaa aggtgttcaa atctcgaacg | 1740 |
| ccgccagagg ccatcgcgct ctgctctagc ctgctggagt acaccccgtc ctcaaggctc | 1800 |
| tccccactag aggcctgcgc acacagcttc tttgatgaac tgcgatgtct gggaacccag | 1860 |
| ctccctaaca accgcccact tccccctctc ttcaacttca gtgctggtga actctccatc | 1920 |
| caaccgtctc tcaatgccat tctcatccct cctcacttga ggtccccagc gggcactacc | 1980 |
| accctcaccc agtcctcaca agctttaact gagactccga ccagctcaga ctggcagtcg | 2040 |
| accgatgcca cacctaccct cactaactcc tcctgagggc cccaccaacc acccttccac | 2100 |
| ttccatctgg gagccccaag aggggctggg aaggggggcc atagcccatc aagctcctgc | 2160 |
| cctggctggg cccctagatt agagggcaga ggtaaatgag tccctgtccc cacctccagt | 2220 |
| ccctccctca ccagcctcac ccctgtggtg ggctttttaa gaggatttta actggttgtg | 2280 |
| gggagggaag agaaggacag ggtgttgggg ggatgaggac ctcctacccc cttggccccc | 2340 |
| tcccctcccc caggcctcca cctccttcaa accccctccc ctcctgtgtt ccttgtaaat | 2400 |
| agaaccagcc cagtccctgt ctccccttcc cttccctggc ccccgggtgt aaatagattg | 2460 |
| ttataatttt tttcttaaag aaaacgtcga ttcgcaccgt ccaacctggc cccgcccctc | 2520 |
| ctacagctgt aactcccctc ctgtcctctg cccccaaggt ctactccctc ctcaccccac | 2580 |
| cctggagggc caggggagtg gagagagctc ctgatgtctt agtttccaca gtaaggtttg | 2640 |
| cctgtgtaca gacctccgtt caataaatta ttggcatgaa aacctg | 2686 |
| <210> 6 | |
| <211> 2686 | |
| <212> DNA | |
| <213> Macaca fascicularis | |
| <400> 6 | |
| caggttttca tgccaataat ttattgaacg gaggtctgta cacaggcaaa ccttactgtg | 60 |
| gaaactaaga catcaggagc tctctccact cccctggccc tccagggtgg ggtgaggagg | 120 |
| gagtagacct tgggggcaga ggacaggagg ggagttacag ctgtaggagg ggcggggcca | 180 |
| ggttggacgg tgcgaatcga cgttttcttt aagaaaaaaa ttataacaat ctatttacac | 240 |
| ccgggggcca gggaagggaa ggggagacag ggactgggct ggttctattt acaaggaaca | 300 |
| caggagggga gggggtttga aggaggtgga ggcctggggg aggggagggg gccaaggggg | 360 |
| taggaggtcc tcatcccccc aacaccctgt ccttctcttc cctccccaca accagttaaa | 420 |
| atcctcttaa aaagcccacc acaggggtga ggctggtgag ggagggactg gaggtgggga | 480 |
| cagggactca tttacctctg ccctctaatc taggggccca gccagggcag gagcttgatg | 540 |
| ggctatggcc ccccttccca gcccctcttg gggctcccag atggaagtgg aagggtggtt | 600 |
| ggtggggccc tcaggaggag ttagtgaggg taggtgtggc atcggtcgac tgccagtctg | 660 |
| agctggtcgg agtctcagtt aaagcttgtg aggactgggt gagggtggta gtgcccgctg | 720 |
| gggacctcaa gtgaggaggg atgagaatgg cattgagaga cggttggatg gagagttcac | 780 |
| cagcactgaa gttgaagaga gggggaagtg ggcggttgtt agggagctgg gttcccagac | 840 |
| atcgcagttc atcaaagaag ctgtgtgcgc aggcctctag tggggagagc cttgaggacg | 900 |
| gggtgtactc cagcaggcta gagcagagcg cgatggcctc tggcggcgtt cgagatttga | 960 |
| acacctttgt ccaggggtga gctttaatct gagggaactt gaactccgtg tagttggggt | 1020 |
| tcatctctcg gatttgttcc cgggttggtg ttcccagcac cttgatgatc tccaccagct | 1080 |
| ggtccacccc actgtcccca gggaagatgg gctggcccag gaggagctcc gccagtacgc | 1140 |
| agccagctga ccaaacatcg atggatgagg tgtaatcagt ggctccaaag atgagctctg | 1200 |
| gggcccggta gtagcgagaa cagatgtagg agacattggg ctcccctcgg accaactgct | 1260 |
| tcgcactgcc aaaatcgcag agcttgagga cagcagtgtc agggtccacc agcaggttct | 1320 |
| ggggcttgat gtcacggtga cacacgccct gggagtggat gtaggccaag ctgcggaaga | 1380 |
| gctggtacat gtacaccttg acatagagga tagggatggt caacttggcc ttggtgaagt | 1440 |
| ggcgggccac ccggtacact gtctcgggca catattccag caccagattt aggtaaagct | 1500 |
| catctttctt ctccccactg gagtagaaaa agtatctcag cctcacaata ttgcagtggt | 1560 |
| ccagcttacg catgatctgc agctctcggt tcttgaacct cttgtcctgg agaaccttct | 1620 |
| tgatggcgac cagttccctg gtctctgcca gccgtgcctg gtacacgacc ccaaatgagc | 1680 |
| cattgccaat cactttgatg tctgtgtaag ccacctcttg ggagcgctct ggaccttggc | 1740 |
| ctagagtggc taccactgtg gtcaccttcc cgctgtcacg gcccagcttc accccgggcg | 1800 |
| gcgggaagct agtgcctgcg ccggggcctc cgctgcctcc gccgccgctg ccgccgggtc | 1860 |
| cacccccgga gctcgaggcc ccgacgcccc cacccatggc cccgacagat gcctttccgc | 1920 |
| cgccggtgcc gcctgggccg gaggccgagc ctccggggcc gccgccgccg cctccgcctc | 1980 |
| cgccgcctgg ctccgcgaac gagctggtcc gcgccctgcc cgagccccca gggccgcctc | 2040 |
| ccgaaggccc gccgccgctc atggcgccga gcacaggccc aggccgcggg gctcgggctc | 2100 |
| cccgggctgc cccagccgcc gccgctgccg ccgcctcccc cgggctctgg cctcttccag | 2160 |
| gccgcgccgc tcgggtttgg gctccggctc cggcccagcg cccgccgcgg ggcacgccgg | 2220 |
| gagatgcagt ccggctgtcg tccgcgccgc cgtcgccgcc ctcggccctt acagagagcc | 2280 |
| ccgtggcacg ccgggaaatg aagtccacaa aagcctcaga gtagaccgcg ggaatgacgg | 2340 |
| gtcgcgctgt acatcgggaa atggagtcca gggtaatctg tctgccgacg gtacgacggg | 2400 |
| gagccctgaa gtatttcggg aagcagagag cctgatgcac gctgggaaac agagtccact | 2460 |
| cactcagttt attggctgtg tgtgcgtccc agagcccggt gcgctctggg aaattgagtc | 2520 |
| ggcgcgcgtg aacctgcgga tctcgggccg tgaagcaagc cgggaaatgg agtcatcgcc | 2580 |
| acgccctcac cgcattgcag gtgtaaagcg attcttaaag cacgccggga aatggagtcc | 2640 |
| caggtggttt cttaagtccc aagtggatac tgcaattccg gagatg | 2686 |
| <210> 7 | |
| <211> 2157 | |
| <212> DNA | |
| <213> Rattus norvegicus | |
| <400> 7 | |
| gccggagccc gaacggcgcg gcctggaaga ggccggagcc caagggaggc ggcggtagag | 60 |
| gcagcggcgg gggcagccca ggcagcccga gccccgcggc ctgggcctgc gctcggcgcc | 120 |
| atgagcggcg gcgggccttc gggaggtggc cctgggggct cgggccgggc gcggaccagc | 180 |
| tcgttcgcgg agccaggcgg cggaggcgga ggcggtggcg gcggccccgg gggctcggcc | 240 |
| tccggcccag gaggcactgg cggcgggaag gcgtcagtcg gggctatggg tgggggcgtg | 300 |
| ggagcctcga gctctggggg tggccccagc ggcagcggcg gaggaggcag cggtggcccc | 360 |
| ggcgcgggca ctagcttccc gccgcccgga gtgaagctgg gccgtgacag cgggaaggtg | 420 |
| accacagtgg tagccactct aggccaaggc ccagagcgtt cccaagaggt ggcttacacc | 480 |
| gacatcaaag tgattggcaa tggctcattc ggagtagtgt accaggcacg gctggcagaa | 540 |
| acgagggaac tggtggccat caagaaggtt cttcaggaca aaaggttcaa gaaccgagag | 600 |
| ctgcagatta tgcgtaagct ggaccactgc aatatcgtga ggctacggta ctttttctac | 660 |
| tccagtgggg agaagaaaga tgagctgtat ttaaatctgg tgctggaata tgtgcccgag | 720 |
| acggtgtacc gagtggcccg tcactttacc aaggccaagt tgatcatccc tatcatctat | 780 |
| gtcaaggtgt acatgtacca gctcttccgg agcttggcct acatccactc ccaaggtgtg | 840 |
| tgtcaccgtg acatcaagcc ccagaatttg cttgtggacc ctgacactgc tgtcctcaag | 900 |
| ctctgcgact ttggcagtgc aaagcagttg gttcgggggg agcccaacgt gtcctacatc | 960 |
| tgttctcggt actaccgtgc tccggagctc atctttggag ccacagatta cacctcgtcc | 1020 |
| atcgatgtgt ggtcagctgg ctgtgtactg gctgagctgc ttcttggcca gcccatcttc | 1080 |
| cctggggaca gtggggtaga ccagcttgtg gagatcatca aggtactagg gacgccaacc | 1140 |
| agggagcaaa tccgagagat gaaccctaac tacacagaat tcaagttccc ccagatcaaa | 1200 |
| gctcacccct ggacaaaggt gttcaaatct cggacaccac ctgaggccat cgcactctgc | 1260 |
| tctagcctgc tggagtacac tccatcctca aggctctccc cactagaggc ctgtgcccac | 1320 |
| agtttctttg atgaactgcg gagtctcgga acccagctcc ccaacaaccg cccgcttccc | 1380 |
| cccctcttca acttcagtcc tggtgaactt tccatccaac cgtctctcaa tgccattctc | 1440 |
| atccctcctc acttgaggtc cccatcaggc cctgctaccc tcacctcgtc ctcacaagct | 1500 |
| ttaactgaga ctcagactgg ccaagactgg caggcacctg atgccacacc taccctcact | 1560 |
| aactcttcct gagggcccta ccgactaccc ctccacgtcc atctgggaag gctcaagtgg | 1620 |
| ggctgggaag ggggccatag cccatccagc tcctgccctg gctgggcccc tagactgagg | 1680 |
| gcagaggtaa atgaactacc cagcatctag gcctccctca ccagcctcac ctttgtggtg | 1740 |
| ggctttttaa agaggatttt aactgtttgt gggggaggga agggaagaga aggacggacg | 1800 |
| gggtttgggg gtatgaggac cttctacccc cgtggtcccc tcccctcccc caggctacca | 1860 |
| ctcctccccc ccccccctcc catgtccctt gtaaatagaa ccagcccagc ccgtatcctc | 1920 |
| ttcctggccc cttgggtgta aatagattgt tataattttt ttcttaaaga aaacgtcgat | 1980 |
| tcacaccatc caacctgccc tccccctcag ctgtaccccc ctcttgtcct ctgctcccaa | 2040 |
| ggcttcctcc ctctccccat cccaaggagg ggagtaggga gagcccctgg tgtcttagtt | 2100 |
| tccacagtaa ggtttgcctg tgtacagacc tccgttcaat aaattattgg catgaaa | 2157 |
| <210> 8 | |
| <211> 2157 | |
| <212> DNA | |
| <213> Rattus norvegicus | |
| <400> 8 | |
| tttcatgcca ataatttatt gaacggaggt ctgtacacag gcaaacctta ctgtggaaac | 60 |
| taagacacca ggggctctcc ctactcccct ccttgggatg gggagaggga ggaagccttg | 120 |
| ggagcagagg acaagagggg ggtacagctg agggggaggg caggttggat ggtgtgaatc | 180 |
| gacgttttct ttaagaaaaa aattataaca atctatttac acccaagggg ccaggaagag | 240 |
| gatacgggct gggctggttc tatttacaag ggacatggga gggggggggg ggaggagtgg | 300 |
| tagcctgggg gaggggaggg gaccacgggg gtagaaggtc ctcatacccc caaaccccgt | 360 |
| ccgtccttct cttcccttcc ctcccccaca aacagttaaa atcctcttta aaaagcccac | 420 |
| cacaaaggtg aggctggtga gggaggccta gatgctgggt agttcattta cctctgccct | 480 |
| cagtctaggg gcccagccag ggcaggagct ggatgggcta tggccccctt cccagcccca | 540 |
| cttgagcctt cccagatgga cgtggagggg tagtcggtag ggccctcagg aagagttagt | 600 |
| gagggtaggt gtggcatcag gtgcctgcca gtcttggcca gtctgagtct cagttaaagc | 660 |
| ttgtgaggac gaggtgaggg tagcagggcc tgatggggac ctcaagtgag gagggatgag | 720 |
| aatggcattg agagacggtt ggatggaaag ttcaccagga ctgaagttga agaggggggg | 780 |
| aagcgggcgg ttgttgggga gctgggttcc gagactccgc agttcatcaa agaaactgtg | 840 |
| ggcacaggcc tctagtgggg agagccttga ggatggagtg tactccagca ggctagagca | 900 |
| gagtgcgatg gcctcaggtg gtgtccgaga tttgaacacc tttgtccagg ggtgagcttt | 960 |
| gatctggggg aacttgaatt ctgtgtagtt agggttcatc tctcggattt gctccctggt | 1020 |
| tggcgtccct agtaccttga tgatctccac aagctggtct accccactgt ccccagggaa | 1080 |
| gatgggctgg ccaagaagca gctcagccag tacacagcca gctgaccaca catcgatgga | 1140 |
| cgaggtgtaa tctgtggctc caaagatgag ctccggagca cggtagtacc gagaacagat | 1200 |
| gtaggacacg ttgggctccc cccgaaccaa ctgctttgca ctgccaaagt cgcagagctt | 1260 |
| gaggacagca gtgtcagggt ccacaagcaa attctggggc ttgatgtcac ggtgacacac | 1320 |
| accttgggag tggatgtagg ccaagctccg gaagagctgg tacatgtaca ccttgacata | 1380 |
| gatgataggg atgatcaact tggccttggt aaagtgacgg gccactcggt acaccgtctc | 1440 |
| gggcacatat tccagcacca gatttaaata cagctcatct ttcttctccc cactggagta | 1500 |
| gaaaaagtac cgtagcctca cgatattgca gtggtccagc ttacgcataa tctgcagctc | 1560 |
| tcggttcttg aaccttttgt cctgaagaac cttcttgatg gccaccagtt ccctcgtttc | 1620 |
| tgccagccgt gcctggtaca ctactccgaa tgagccattg ccaatcactt tgatgtcggt | 1680 |
| gtaagccacc tcttgggaac gctctgggcc ttggcctaga gtggctacca ctgtggtcac | 1740 |
| cttcccgctg tcacggccca gcttcactcc gggcggcggg aagctagtgc ccgcgccggg | 1800 |
| gccaccgctg cctcctccgc cgctgccgct ggggccaccc ccagagctcg aggctcccac | 1860 |
| gcccccaccc atagccccga ctgacgcctt cccgccgcca gtgcctcctg ggccggaggc | 1920 |
| cgagcccccg gggccgccgc caccgcctcc gcctccgccg cctggctccg cgaacgagct | 1980 |
| ggtccgcgcc cggcccgagc ccccagggcc acctcccgaa ggcccgccgc cgctcatggc | 2040 |
| gccgagcgca ggcccaggcc gcggggctcg ggctgcctgg gctgcccccg ccgctgcctc | 2100 |
| taccgccgcc tcccttgggc tccggcctct tocaggccgc gccgttcggg ctccggc | 2157 |

1. A double stranded ribonucleic acid (dsRNA) agent for inhibiting expression of Glycogen Synthase Kinase 3 alpha (GSK3α),
(a) wherein the dsRNA agent comprises a sense strand and an antisense strand forming a double stranded region,
wherein the antisense strand comprises at least 15 contiguous nucleotides differing by no more than 3 nucleotides from any one of the antisense nucleotide sequences in any one of Tables 2-5 and 8-9, and
wherein the sense strand or the antisense strand is conjugated to one or more lipophilic moieties, or
(b) wherein the dsRNA agent comprises a sense strand and an antisense strand forming a double stranded region,
wherein the sense strand comprises at least 15 contiguous nucleotides differing by no more than 3 nucleotides from any one of the nucleotide sequences of nucleotides 476-518, 588-620, 610-638, 636-664, 676-722, 688-722, 900-928, 955-992, 1007-1035, 1026-1054, 1187-1222, 1187-1252, 1224-1252, 1265-1298, 1342-1370, 1397-1433, 1509-1554, 1509-1537, 1563-1591, 1760-1791, 1983-2017, 1983-2011, 2116-2191, or 2116-2164, of SEQ ID NO: 1, and the antisense strand comprises at least 15 contiguous nucleotides differing by no more than 3 nucleotides from the corresponding nucleotide sequence of SEQ ID NO: 2, and
wherein the sense strand or the antisense strand is conjugated to one or more lipophilic moieties; or
(c) wherein the dsRNA agent comprises a sense strand and an antisense strand forming a double stranded region,
wherein the sense strand comprises at least 15 contiguous nucleotides differing by no more than 3 nucleotides from any one of the nucleotide sequences of nucleotides 542-564; 666-688; 1012-1034; 1573-1595; 1845-1867; 2075-2097; 2225-2247; or 2227-2249 of SEQ ID NO: 1, wherein the antisense strand comprises at least 15 contiguous nucleotides differing by no more than 3 nucleotides from the corresponding nucleotide sequence of SEQ ID NO: 2, and
wherein the sense strand or the antisense strand is conjugated to one or more lipophilic moieties.

2.-18. (canceled)

19. The dsRNA agent of claim 1, wherein all of the nucleotides of the sense strand and all of the nucleotides of the antisense strand comprise a modification.

20. The dsRNA agent of claim 19, wherein at least one of the modified nucleotides is selected from the group a deoxy-nucleotide, a 3′-terminal deoxythimidine (dT) nucleotide, a 2′-O-methyl modified nucleotide, a 2′-fluoro modified nucleotide, a 2′-deoxy-modified nucleotide, a 2′-5′-linked ribonucleotide (3′-RNA), a locked nucleotide, an unlocked nucleotide, a conformationally restricted nucleotide, a constrained ethyl nucleotide, an abasic nucleotide, a 2′-amino-modified nucleotide, a 2′-O-allyl-modified nucleotide, 2′-C-alkyl-modified nucleotide, a 2′-methoxyethyl modified nucleotide, a 2′-O-alkyl-modified nucleotide, a morpholino nucleotide, a phosphoramidate, a non-natural base comprising nucleotide, a tetrahydropyran modified nucleotide, a 1,5-anhydrohexitol modified nucleotide, a cyclohexenyl modified nucleotide, a nucleotide comprising a 5′-phosphorothioate group, a nucleotide comprising a 5′-methylphosphonate group, a nucleotide comprising a 5′ phosphate or 5′ phosphate mimic, a nucleotide comprising vinyl phosphonate, a nucleotide comprising adenosine-glycol nucleic acid (GNA), a glycol nucleic acid S-Isomer (S-GNA), a nucleotide comprising 2-hydroxymethyl-tetrahydrofurane-5-phosphate, a nucleotide comprising 2′-deoxythymidine-3′phosphate, a nucleotide comprising 2′-deoxyguanosine-3′-phosphate, a nucleotide comprising a 2′ phosphate, and a terminal nucleotide linked to a cholesteryl derivative and a dodecanoic acid bisdecylamide group; and combinations thereof.

21.-23. (canceled)

24. The dsRNA agent of claim 1, further comprising at least one phosphorothioate internucleotide linkage.

25. (canceled)

26. The dsRNA agent of claim 1, wherein each strand is no more than 30 nucleotides in length.

27.-38. (canceled)

39. The dsRNA agent of claim 1, wherein the one or more lipophilic moieties are conjugated to one or more internal positions on at least one strand via a linker or carrier.

40.-47. (canceled)

48. The dsRNA agent of claim 1, wherein the one or more lipophilic moieties are conjugated to one or more of the internal positions selected from the group consisting of positions 4-8 and 13-18 on the sense strand, and positions 6-10 and 15-18 on the antisense strand, counting from the 5′-end of each strand.

49.-55. (canceled)

56. The dsRNA agent of claim 1, wherein the lipophilic moiety is an aliphatic, alicyclic, or polyalicyclic compound.

57. (canceled)

58. (canceled)

59. The dsRNA agent of claim 56, wherein the lipophilic moiety contains a saturated or unsaturated C6-C18 hydrocarbon chain.

60. (canceled)

61. (canceled)

62. The dsRNA agent of claim 1, wherein the lipophilic moiety is conjugated via a carrier that replaces one or more nucleotide(s) in the internal position(s) or the double stranded region.

63. (canceled)

64. (canceled)

65. The dsRNA agent of claim 1, wherein the lipophilic moiety is conjugated to a nucleobase, sugar moiety, or internucleosidic linkage.

66.-74. (canceled)

75. The dsRNA agent of claim 1, wherein the agent further comprises a phosphate or phosphate mimic at the 5′-end of the antisense strand.

76.-78. (canceled)

79. A cell containing the dsRNA agent of claim 1.

80. A pharmaceutical composition for inhibiting expression of a gene encoding GSK3α, comprising the dsRNA agent of claim 1.

81. (canceled)

82. A method of inhibiting expression of a GSK3α gene in a cell, the method comprising:
(a) contacting the cell with the dsRNA agent of claim 1; and
(b) maintaining the cell produced in step (a) for a time sufficient to obtain degradation of the mRNA transcript of the GSK3α gene, thereby inhibiting expression of the GSK3α gene in the cell.

83.-88. (canceled)

89. A method of treating a subject diagnosed with a GSK3α-associated neurodegenerative disease, the method comprising administering to the subject a therapeutically effective amount of the dsRNA agent of claim 1, thereby treating the subject.

90.-96. (canceled)

97. The method of claim 89, wherein the dsRNA agent is administered to the subject at a dose of about 0.01 mg/kg to about 50 mg/kg.

98. The method of claim 89, wherein the dsRNA agent is administered to the subject intrathecally or intracerebroventricularly.

99.-101. (canceled)

The application's sequence listing, which the Patent Office published only in electronic form, follows.

SEQUENCE LISTING (903 sequences)

SEQ ID NO: 1 - DNA, 2276 bp, Mus musculus
  source 1..2276: mol_type = other DNA
gtggtgacaacgaagccgacggcagagggacttcatctcccggcgtgccccgcggcgggcgctgggccggagccggagcccgaacggcgcggcctggaagaggccggagcccaggggaggcggcggcagaggcagcggcgggggcagcccaggcagcccgagccccgcggcctgggcctgcgctcggcgccatgagcggcggcgggccttcgggaggcggccctgggggctcgggccgggcgcggaccagctcgttcgcggagccaggaggcggaggcggaggtggtggcggcggccccgggggctcggcctctggcccaggaggcactggcggcgggaaagcgtcagtcggggctatgggtgggggcgtgggagcctcgagctccgggggtggccccagcggcagcggcggaggaggcagcggtggccccggcgcgggcactagcttcccgccgccgggagtgaagctgggccgtgacagcgggaaggtgaccacagtggtagccactgtaggccaaggcccagagcgttcccaagaagtggcttacactgacatcaaagtgattggtaatggctcattcggagtagtataccaggcacggctggcagagacgagggaactggtggccatcaagaaggttcttcaggacaaaaggttcaagaaccgagaactgcagattatgcgtaagctggaccactgcaatattgtgaggctgcggtactttttctactccagtggggagaagaaggacgagctgtatttgaatctggtgctggagtatgtgcccgagacggtgtaccgagtggcccgccacttcaccaaggccaagctgatcacccctatcatctacatcaaggtgtacatgtaccagctcttccggagcttggcctacatccactcccaaggtgtgtgtcaccgtgacatcaagccccagaatttgcttgtggaccctgacactgctgtcctcaagctctgcgattttggcagtgcaaagcagctggttcggggggagcccaatgtgtcctacatctgctctcggtactaccgtgctccagaactcatctttggagccacagattacacctcgtccatcgatgtgtggtcggctggctgtgtacttgctgagctacttctcggccagcccatcttccctggggacagtggggtggaccagcttgtggagatcatcaaggtactaggaacgccaaccagggaacaaatccgagagatgaaccctaactatacggagttcaagttcccccagatcaaagctcacccttggacaaaggtgttcaaatcttcaaagacaccacctgaggccattgcactctgctctagcctactggagtacacgccatcctcaaggctctccccactcgaggcttgtgcccacagcttcttcgatgaactgcggagactcggagcccagctccccaacgaccgcccgcttccccccctgttcaacttcagtcctggtgaactgtccatccaaccatctctcaatgccattctcatccctcctcacttgaggtccccagcaggccctgcttctcccctcaccacttcctacaacccatcctcacaagctttaactgaagctcagactggccaagattggcagccatctgatgccacaactgctaccctcgctagctcttcctgagggccccaccgactacccctccacgtccatctgggaaggcccaagtggcgctgggaagggggccacagcccatcaagctcctgccctggctgggcccctagactagagggcagaggtaaatgaactacccccagcatctaggcctccctcagcagcctaacctctgtggtgggctttttaaagaggattttaactgtttgtaggggaggggagaaaaggaaggacggggtttgggggtgtgaggaccttctacccccttggtcccctcccctcccccaggctaccactccttccctccccccctctcccaggtcccttgtaaatagaaccagcccagcccatctctcgtcttcccttccctggccccctgggtgtaaatagattgttataattttttcttaaagaaaacgtcaattcacaccattcaacttgccccccccagctgtaccccttcttgtcctctgctcccaaggcttcctccctctccccatcctggaaggaggggagtagagagagtccctggtgtcttagtttccacagtaaggtttgcctgtgtacagacctctgttcaataaattattggcatgaaacccttaaaaaaaaaaaaaaaaa

SEQ ID NO: 2 - DNA, 2276 bp, Mus musculus
  source 1..2276: mol_type = other DNA
tttttttttttttttttaagggtttcatgccaataatttattgaacagaggtctgtacacaggcaaaccttactgtggaaactaagacaccagggactctctctactcccctccttccaggatggggagagggaggaagccttgggagcagaggacaagaaggggtacagctggggggggcaagttgaatggtgtgaattgacgttttctttaagaaaaaattataacaatctatttacacccagggggccagggaagggaagacgagagatgggctgggctggttctatttacaagggacctgggagagggggggagggaaggagtggtagcctgggggaggggaggggaccaagggggtagaaggtcctcacacccccaaaccccgtccttccttttctcccctcccctacaaacagttaaaatcctctttaaaaagcccaccacagaggttaggctgctgagggaggcctagatgctgggggtagttcatttacctctgccctctagtctaggggcccagccagggcaggagcttgatgggctgtggcccccttcccagcgccacttgggccttcccagatggacgtggaggggtagtcggtggggccctcaggaagagctagcgagggtagcagttgtggcatcagatggctgccaatcttggccagtctgagcttcagttaaagcttgtgaggatgggttgtaggaagtggtgaggggagaagcagggcctgctggggacctcaagtgaggagggatgagaatggcattgagagatggttggatggacagttcaccaggactgaagttgaacagggggggaagcgggcggtcgttggggagctgggctccgagtctccgcagttcatcgaagaagctgtgggcacaagcctcgagtggggagagccttgaggatggcgtgtactccagtaggctagagcagagtgcaatggcctcaggtggtgtctttgaagatttgaacacctttgtccaagggtgagctttgatctgggggaacttgaactccgtatagttagggttcatctctcggatttgttccctggttggcgttcctagtaccttgatgatctccacaagctggtccaccccactgtccccagggaagatgggctggccgagaagtagctcagcaagtacacagccagccgaccacacatcgatggacgaggtgtaatctgtggctccaaagatgagttctggagcacggtagtaccgagagcagatgtaggacacattgggctccccccgaaccagctgctttgcactgccaaaatcgcagagcttgaggacagcagtgtcagggtccacaagcaaattctggggcttgatgtcacggtgacacacaccttgggagtggatgtaggccaagctccggaagagctggtacatgtacaccttgatgtagatgataggggtgatcagcttggccttggtgaagtggcgggccactcggtacaccgtctcgggcacatactccagcaccagattcaaatacagctcgtccttcttctccccactggagtagaaaaagtaccgcagcctcacaatattgcagtggtccagcttacgcataatctgcagttctcggttcttgaaccttttgtcctgaagaaccttcttgatggccaccagttccctcgtctctgccagccgtgcctggtatactactccgaatgagccattaccaatcactttgatgtcagtgtaagccacttcttgggaacgctctgggccttggcctacagtggctaccactgtggtcaccttcccgctgtcacggcccagcttcactcccggcggcgggaagctagtgcccgcgccggggccaccgctgcctcctccgccgctgccgctggggccacccccggagctcgaggctcccacgcccccacccatagccccgactgacgctttcccgccgccagtgcctcctgggccagaggccgagcccccggggccgccgccaccacctccgcctccgcctcctggctccgcgaacgagctggtccgcgcccggcccgagcccccagggccgcctcccgaaggcccgccgccgctcatggcgccgagcgcaggcccaggccgcggggctcgggctgcctgggctgcccccgccgctgcctctgccgccgcctcccctgggctccggcctcttccaggccgcgccgttcgggctccggctccggcccagcgcccgccgcggggcacgccgggagatgaagtccctctgccgtcggcttcgttgtcaccac

SEQ ID NO: 3 - DNA, 2193 bp, Homo sapiens
  source 1..2193: mol_type = other DNA
gctgggccggagccggagcccaagccagagcggcgcggcctggaagaggccagggcccgggggaggcggcggcagcggcggcggctggggcagcccgggcagcccgagccccgcagcctgggcctgtgctcggcgccatgagcggcggcgggccttcgggaggcggccctgggggctcgggcagggcgcggactagctcgttcgcggagcccggcggcggaggcggaggaggcggcggcggccccggaggctcggcctccggcccaggcggcaccggcggcggaaaggcatctgtcggggccatgggtgggggcgtcggggcctcgagctccgggggtggacccggcggcagcggcggaggaggcagcggaggccccggcgcaggcactagcttcccgccgcccggggtgaagctgggccgtgacagcgggaaggtgaccacagtcgtagccactctaggccaaggcccagagcgctcccaagaagtggcttacacggacatcaaagtgattggcaatggctcatttggggtcgtgtaccaggcacggctggcagagaccagggaactagtcgccatcaagaaggttctccaggacaagaggttcaagaaccgagagctgcagatcatgcgtaagctggaccactgcaatattgtgaggctgagatactttttctactccagtggcgagaagaaagacgagctttacctaaatctggtgctggaatatgtgcccgagacagtgtaccgggtggcccgccacttcaccaaggccaagttgaccatccctatcctctatgtcaaggtgtacatgtaccagctcttccgcagcttggcctacatccactcccagggcgtgtgtcaccgcgacatcaagccccagaacctgctggtggaccctgacactgctgtcctcaagctctgcgattttggcagtgcaaagcagttggtccgaggggagcccaatgtctcctacatctgttctcgctactaccgggccccagagctcatctttggagccactgattacacctcatccatcgatgtttggtcagctggctgtgtactggcagagctcctcttgggccagcccatcttccctggggacagtggggtggaccagctggtggagatcatcaaggtgctgggaacaccaacccgggaacaaatccgagagatgaaccccaactacacggagttcaagttccctcagattaaagctcacccctggacaaaggtgttcaaatctcgaacgccgccagaggccatcgcgctctgctctagcctgctggagtacaccccatcctcaaggctctccccactagaggcctgtgcgcacagcttctttgatgaactgcgatgtctgggaacccagctgcctaacaaccgcccacttccccctctcttcaacttcagtgctggtgaactctccatccaaccgtctctcaacgccattctcatccctcctcacttgaggtccccagcgggcactaccaccctcaccccgtcctcacaagctttaactgagactccgaccagctcagactggcagtcgaccgatgccacacctaccctcactaactcctcctgagggccccaccaagcacccttccacttccatctgggagccccaagaggggctgggaaggggggccatagcccatcaagctcctgccctggctgggcccctagactagagggcagaggtaaatgagtccctgtccccacctccagtccctccctcaccagcctcacccctgtggtgggctttttaagaggattttaactggttgtggggagggaagagaaggacagggtgttggggggatgaggacctcctacccccttggccccctcccctcccccagacctccacctcctccagaccccctcccctcctgtgtcccttgtaaatagaaccagcccagcccgtctcctcttcccttccctggcccccgggtgtaaatagattgttataatttttttcttaaagaaaacgtcgattcgcaccgtccaacctggccccgcccctcctacagctgtaactcccctcctgtcctctgcccccaaggtctactccctcctcaccccaccctggagggccaggggagtggagagagctcctgatgtcttagtttccacagtaaggtttgcctgtgtacagacctccgttcaataaattattggcatgaaaa

SEQ ID NO: 4 - DNA, 2193 bp, Homo sapiens
  source 1..2193: mol_type = other DNA
ttttcatgccaataatttattgaacggaggtctgtacacaggcaaaccttactgtggaaactaagacatcaggagctctctccactcccctggccctccagggtggggtgaggagggagtagaccttgggggcagaggacaggaggggagttacagctgtaggaggggcggggccaggttggacggtgcgaatcgacgttttctttaagaaaaaaattataacaatctatttacacccgggggccagggaagggaagaggagacgggctgggctggttctatttacaagggacacaggaggggagggggtctggaggaggtggaggtctgggggaggggagggggccaagggggtaggaggtcctcatccccccaacaccctgtccttctcttccctccccacaaccagttaaaatcctcttaaaaagcccaccacaggggtgaggctggtgagggagggactggaggtggggacagggactcatttacctctgccctctagtctaggggcccagccagggcaggagcttgatgggctatggccccccttcccagcccctcttggggctcccagatggaagtggaagggtgcttggtggggccctcaggaggagttagtgagggtaggtgtggcatcggtcgactgccagtctgagctggtcggagtctcagttaaagcttgtgaggacggggtgagggtggtagtgcccgctggggacctcaagtgaggagggatgagaatggcgttgagagacggttggatggagagttcaccagcactgaagttgaagagagggggaagtgggcggttgttaggcagctgggttcccagacatcgcagttcatcaaagaagctgtgcgcacaggcctctagtggggagagccttgaggatggggtgtactccagcaggctagagcagagcgcgatggcctctggcggcgttcgagatttgaacacctttgtccaggggtgagctttaatctgagggaacttgaactccgtgtagttggggttcatctctcggatttgttcccgggttggtgttcccagcaccttgatgatctccaccagctggtccaccccactgtccccagggaagatgggctggcccaagaggagctctgccagtacacagccagctgaccaaacatcgatggatgaggtgtaatcagtggctccaaagatgagctctggggcccggtagtagcgagaacagatgtaggagacattgggctcccctcggaccaactgctttgcactgccaaaatcgcagagcttgaggacagcagtgtcagggtccaccagcaggttctggggcttgatgtcgcggtgacacacgccctgggagtggatgtaggccaagctgcggaagagctggtacatgtacaccttgacatagaggatagggatggtcaacttggccttggtgaagtggcgggccacccggtacactgtctcgggcacatattccagcaccagatttaggtaaagctcgtctttcttctcgccactggagtagaaaaagtatctcagcctcacaatattgcagtggtccagcttacgcatgatctgcagctctcggttcttgaacctcttgtcctggagaaccttcttgatggcgactagttccctggtctctgccagccgtgcctggtacacgaccccaaatgagccattgccaatcactttgatgtccgtgtaagccacttcttgggagcgctctgggccttggcctagagtggctacgactgtggtcaccttcccgctgtcacggcccagcttcaccccgggcggcgggaagctagtgcctgcgccggggcctccgctgcctcctccgccgctgccgccgggtccacccccggagctcgaggccccgacgcccccacccatggccccgacagatgcctttccgccgccggtgccgcctgggccggaggccgagcctccggggccgccgccgcctcctccgcctccgccgccgggctccgcgaacgagctagtccgcgccctgcccgagcccccagggccgcctcccgaaggcccgccgccgctcatggcgccgagcacaggcccaggctgcggggctcgggctgcccgggctgccccagccgccgccgctgccgccgcctcccccgggccctggcctcttccaggccgcgccgctctggcttgggctccggctccggcccagc

SEQ ID NO: 5 - DNA, 2686 bp, Macaca fascicularis
  source 1..2686: mol_type = other DNA
catctccggaattgcagtatccacttgggacttaagaaaccacctgggactccatttcccggcgtgctttaagaatcgctttacacctgcaatgcggtgagggcgtggcgatgactccatttcccggcttgcttcacggcccgagatccgcaggttcacgcgcgccgactcaatttcccagagcgcaccgggctctgggacgcacacacagccaataaactgagtgagtggactctgtttcccagcgtgcatcaggctctctgcttcccgaaatacttcagggctccccgtcgtaccgtcggcagacagattaccctggactccatttcccgatgtacagcgcgacccgtcattcccgcggtctactctgaggcttttgtggacttcatttcccggcgtgccacggggctctctgtaagggccgagggcggcgacggcggcgcggacgacagccggactgcatctcccggcgtgccccgcggcgggcgctgggccggagccggagcccaaacccgagcggcgcggcctggaagaggccagagcccgggggaggcggcggcagcggcggcggctggggcagcccggggagcccgagccccgcggcctgggcctgtgctcggcgccatgagcggcggcgggccttcgggaggcggccctgggggctcgggcagggcgcggaccagctcgttcgcggagccaggcggcggaggcggaggcggcggcggcggccccggaggctcggcctccggcccaggcggcaccggcggcggaaaggcatctgtcggggccatgggtgggggcgtcggggcctcgagctccgggggtggacccggcggcagcggcggcggaggcagcggaggccccggcgcaggcactagcttcccgccgcccggggtgaagctgggccgtgacagcgggaaggtgaccacagtggtagccactctaggccaaggtccagagcgctcccaagaggtggcttacacagacatcaaagtgattggcaatggctcatttggggtcgtgtaccaggcacggctggcagagaccagggaactggtcgccatcaagaaggttctccaggacaagaggttcaagaaccgagagctgcagatcatgcgtaagctggaccactgcaatattgtgaggctgagatactttttctactccagtggggagaagaaagatgagctttacctaaatctggtgctggaatatgtgcccgagacagtgtaccgggtggcccgccacttcaccaaggccaagttgaccatccctatcctctatgtcaaggtgtacatgtaccagctcttccgcagcttggcctacatccactcccagggcgtgtgtcaccgtgacatcaagccccagaacctgctggtggaccctgacactgctgtcctcaagctctgcgattttggcagtgcgaagcagttggtccgaggggagcccaatgtctcctacatctgttctcgctactaccgggccccagagctcatctttggagccactgattacacctcatccatcgatgtttggtcagctggctgcgtactggcggagctcctcctgggccagcccatcttccctggggacagtggggtggaccagctggtggagatcatcaaggtgctgggaacaccaacccgggaacaaatccgagagatgaaccccaactacacggagttcaagttccctcagattaaagctcacccctggacaaaggtgttcaaatctcgaacgccgccagaggccatcgcgctctgctctagcctgctggagtacaccccgtcctcaaggctctccccactagaggcctgcgcacacagcttctttgatgaactgcgatgtctgggaacccagctccctaacaaccgcccacttccccctctcttcaacttcagtgctggtgaactctccatccaaccgtctctcaatgccattctcatccctcctcacttgaggtccccagcgggcactaccaccctcacccagtcctcacaagctttaactgagactccgaccagctcagactggcagtcgaccgatgccacacctaccctcactaactcctcctgagggccccaccaaccacccttccacttccatctgggagccccaagaggggctgggaaggggggccatagcccatcaagctcctgccctggctgggcccctagattagagggcagaggtaaatgagtccctgtccccacctccagtccctccctcaccagcctcacccctgtggtgggctttttaagaggattttaactggttgtggggagggaagagaaggacagggtgttggggggatgaggacctcctacccccttggccccctcccctcccccaggcctccacctccttcaaaccccctcccctcctgtgttccttgtaaatagaaccagcccagtccctgtctccccttcccttccctggcccccgggtgtaaatagattgttataatttttttcttaaagaaaacgtcgattcgcaccgtccaacctggccccgcccctcctacagctgtaactcccctcctgtcctctgcccccaaggtctactccctcctcaccccaccctggagggccaggggagtggagagagctcctgatgtcttagtttccacagtaaggtttgcctgtgtacagacctccgttcaataaattattggcatgaaaacctg

SEQ ID NO: 6 - DNA, 2686 bp, Macaca fascicularis
  source 1..2686: mol_type = other DNA
caggttttcatgccaataatttattgaacggaggtctgtacacaggcaaaccttactgtggaaactaagacatcaggagctctctccactcccctggccctccagggtggggtgaggagggagtagaccttgggggcagaggacaggaggggagttacagctgtaggaggggcggggccaggttggacggtgcgaatcgacgttttctttaagaaaaaaattataacaatctatttacacccgggggccagggaagggaaggggagacagggactgggctggttctatttacaaggaacacaggaggggagggggtttgaaggaggtggaggcctgggggaggggagggggccaagggggtaggaggtcctcatccccccaacaccctgtccttctcttccctccccacaaccagttaaaatcctcttaaaaagcccaccacaggggtgaggctggtgagggagggactggaggtggggacagggactcatttacctctgccctctaatctaggggcccagccagggcaggagcttgatgggctatggccccccttcccagcccctcttggggctcccagatggaagtggaagggtggttggtggggccctcaggaggagttagtgagggtaggtgtggcatcggtcgactgccagtctgagctggtcggagtctcagttaaagcttgtgaggactgggtgagggtggtagtgcccgctggggacctcaagtgaggagggatgagaatggcattgagagacggttggatggagagttcaccagcactgaagttgaagagagggggaagtgggcggttgttagggagctgggttcccagacatcgcagttcatcaaagaagctgtgtgcgcaggcctctagtggggagagccttgaggacggggtgtactccagcaggctagagcagagcgcgatggcctctggcggcgttcgagatttgaacacctttgtccaggggtgagctttaatctgagggaacttgaactccgtgtagttggggttcatctctcggatttgttcccgggttggtgttcccagcaccttgatgatctccaccagctggtccaccccactgtccccagggaagatgggctggcccaggaggagctccgccagtacgcagccagctgaccaaacatcgatggatgaggtgtaatcagtggctccaaagatgagctctggggcccggtagtagcgagaacagatgtaggagacattgggctcccctcggaccaactgcttcgcactgccaaaatcgcagagcttgaggacagcagtgtcagggtccaccagcaggttctggggcttgatgtcacggtgacacacgccctgggagtggatgtaggccaagctgcggaagagctggtacatgtacaccttgacatagaggatagggatggtcaacttggccttggtgaagtggcgggccacccggtacactgtctcgggcacatattccagcaccagatttaggtaaagctcatctttcttctccccactggagtagaaaaagtatctcagcctcacaatattgcagtggtccagcttacgcatgatctgcagctctcggttcttgaacctcttgtcctggagaaccttcttgatggcgaccagttccctggtctctgccagccgtgcctggtacacgaccccaaatgagccattgccaatcactttgatgtctgtgtaagccacctcttgggagcgctctggaccttggcctagagtggctaccactgtggtcaccttcccgctgtcacggcccagcttcaccccgggcggcgggaagctagtgcctgcgccggggcctccgctgcctccgccgccgctgccgccgggtccacccccggagctcgaggccccgacgcccccacccatggccccgacagatgcctttccgccgccggtgccgcctgggccggaggccgagcctccggggccgccgccgccgcctccgcctccgccgcctggctccgcgaacgagctggtccgcgccctgcccgagcccccagggccgcctcccgaaggcccgccgccgctcatggcgccgagcacaggcccaggccgcggggctcgggctccccgggctgccccagccgccgccgctgccgccgcctcccccgggctctggcctcttccaggccgcgccgctcgggtttgggctccggctccggcccagcgcccgccgcggggcacgccgggagatgcagtccggctgtcgtccgcgccgccgtcgccgccctcggcccttacagagagccccgtggcacgccgggaaatgaagtccacaaaagcctcagagtagaccgcgggaatgacgggtcgcgctgtacatcgggaaatggagtccagggtaatctgtctgccgacggtacgacggggagccctgaagtatttcgggaagcagagagcctgatgcacgctgggaaacagagtccactcactcagtttattggctgtgtgtgcgtcccagagcccggtgcgctctgggaaattgagtcggcgcgcgtgaacctgcggatctcgggccgtgaagcaagccgggaaatggagtcatcgccacgccctcaccgcattgcaggtgtaaagcgattcttaaagcacgccgggaaatggagtcccaggtggtttcttaagtcccaagtggatactgcaattccggagatg

SEQ ID NO: 7 - DNA, 2157 bp, Rattus norvegicus
  source 1..2157: mol_type = other DNA
gccggagcccgaacggcgcggcctggaagaggccggagcccaagggaggcggcggtagaggcagcggcgggggcagcccaggcagcccgagccccgcggcctgggcctgcgctcggcgccatgagcggcggcgggccttcgggaggtggccctgggggctcgggccgggcgcggaccagctcgttcgcggagccaggcggcggaggcggaggcggtggcggcggccccgggggctcggcctccggcccaggaggcactggcggcgggaaggcgtcagtcggggctatgggtgggggcgtgggagcctcgagctctgggggtggccccagcggcagcggcggaggaggcagcggtggccccggcgcgggcactagcttcccgccgcccggagtgaagctgggccgtgacagcgggaaggtgaccacagtggtagccactctaggccaaggcccagagcgttcccaagaggtggcttacaccgacatcaaagtgattggcaatggctcattcggagtagtgtaccaggcacggctggcagaaacgagggaactggtggccatcaagaaggttcttcaggacaaaaggttcaagaaccgagagctgcagattatgcgtaagctggaccactgcaatatcgtgaggctacggtactttttctactccagtggggagaagaaagatgagctgtatttaaatctggtgctggaatatgtgcccgagacggtgtaccgagtggcccgtcactttaccaaggccaagttgatcatccctatcatctatgtcaaggtgtacatgtaccagctcttccggagcttggcctacatccactcccaaggtgtgtgtcaccgtgacatcaagccccagaatttgcttgtggaccctgacactgctgtcctcaagctctgcgactttggcagtgcaaagcagttggttcggggggagcccaacgtgtcctacatctgttctcggtactaccgtgctccggagctcatctttggagccacagattacacctcgtccatcgatgtgtggtcagctggctgtgtactggctgagctgcttcttggccagcccatcttccctggggacagtggggtagaccagcttgtggagatcatcaaggtactagggacgccaaccagggagcaaatccgagagatgaaccctaactacacagaattcaagttcccccagatcaaagctcacccctggacaaaggtgttcaaatctcggacaccacctgaggccatcgcactctgctctagcctgctggagtacactccatcctcaaggctctccccactagaggcctgtgcccacagtttctttgatgaactgcggagtctcggaacccagctccccaacaaccgcccgcttccccccctcttcaacttcagtcctggtgaactttccatccaaccgtctctcaatgccattctcatccctcctcacttgaggtccccatcaggccctgctaccctcacctcgtcctcacaagctttaactgagactcagactggccaagactggcaggcacctgatgccacacctaccctcactaactcttcctgagggccctaccgactacccctccacgtccatctgggaaggctcaagtggggctgggaagggggccatagcccatccagctcctgccctggctgggcccctagactgagggcagaggtaaatgaactacccagcatctaggcctccctcaccagcctcacctttgtggtgggctttttaaagaggattttaactgtttgtgggggagggaagggaagagaaggacggacggggtttgggggtatgaggaccttctacccccgtggtcccctcccctcccccaggctaccactcctcccccccccccctcccatgtcccttgtaaatagaaccagcccagcccgtatcctcttcctggccccttgggtgtaaatagattgttataatttttttcttaaagaaaacgtcgattcacaccatccaacctgccctccccctcagctgtacccccctcttgtcctctgctcccaaggcttcctccctctccccatcccaaggaggggagtagggagagcccctggtgtcttagtttccacagtaaggtttgcctgtgtacagacctccgttcaataaattattggcatgaaa

SEQ ID NO: 8 - DNA, 2157 bp, Rattus norvegicus
  source 1..2157: mol_type = other DNA
tttcatgccaataatttattgaacggaggtctgtacacaggcaaaccttactgtggaaactaagacaccaggggctctccctactcccctccttgggatggggagagggaggaagccttgggagcagaggacaagaggggggtacagctgagggggagggcaggttggatggtgtgaatcgacgttttctttaagaaaaaaattataacaatctatttacacccaaggggccaggaagaggatacgggctgggctggttctatttacaagggacatgggaggggggggggggaggagtggtagcctgggggaggggaggggaccacgggggtagaaggtcctcatacccccaaaccccgtccgtccttctcttcccttccctcccccacaaacagttaaaatcctctttaaaaagcccaccacaaaggtgaggctggtgagggaggcctagatgctgggtagttcatttacctctgccctcagtctaggggcccagccagggcaggagctggatgggctatggcccccttcccagccccacttgagccttcccagatggacgtggaggggtagtcggtagggccctcaggaagagttagtgagggtaggtgtggcatcaggtgcctgccagtcttggccagtctgagtctcagttaaagcttgtgaggacgaggtgagggtagcagggcctgatggggacctcaagtgaggagggatgagaatggcattgagagacggttggatggaaagttcaccaggactgaagttgaagagggggggaagcgggcggttgttggggagctgggttccgagactccgcagttcatcaaagaaactgtgggcacaggcctctagtggggagagccttgaggatggagtgtactccagcaggctagagcagagtgcgatggcctcaggtggtgtccgagatttgaacacctttgtccaggggtgagctttgatctgggggaacttgaattctgtgtagttagggttcatctctcggatttgctccctggttggcgtccctagtaccttgatgatctccacaagctggtctaccccactgtccccagggaagatgggctggccaagaagcagctcagccagtacacagccagctgaccacacatcgatggacgaggtgtaatctgtggctccaaagatgagctccggagcacggtagtaccgagaacagatgtaggacacgttgggctccccccgaaccaactgctttgcactgccaaagtcgcagagcttgaggacagcagtgtcagggtccacaagcaaattctggggcttgatgtcacggtgacacacaccttgggagtggatgtaggccaagctccggaagagctggtacatgtacaccttgacatagatgatagggatgatcaacttggccttggtaaagtgacgggccactcggtacaccgtctcgggcacatattccagcaccagatttaaatacagctcatctttcttctccccactggagtagaaaaagtaccgtagcctcacgatattgcagtggtccagcttacgcataatctgcagctctcggttcttgaaccttttgtcctgaagaaccttcttgatggccaccagttccctcgtttctgccagccgtgcctggtacactactccgaatgagccattgccaatcactttgatgtcggtgtaagccacctcttgggaacgctctgggccttggcctagagtggctaccactgtggtcaccttcccgctgtcacggcccagcttcactccgggcggcgggaagctagtgcccgcgccggggccaccgctgcctcctccgccgctgccgctggggccacccccagagctcgaggctcccacgcccccacccatagccccgactgacgccttcccgccgccagtgcctcctgggccggaggccgagcccccggggccgccgccaccgcctccgcctccgccgcctggctccgcgaacgagctggtccgcgcccggcccgagcccccagggccacctcccgaaggcccgccgccgctcatggcgccgagcgcaggcccaggccgcggggctcgggctgcctgggctgcccccgccgctgcctctaccgccgcctcccttgggctccggcctcttccaggccgcgccgttcgggctccggc

SEQ ID NO: 9 - protein, 16 aa, unidentified
AAVALLPAVLLALLAP

SEQ ID NO: 10 - protein, 11 aa, unidentified
AALLPVLLAAP

SEQ ID NO: 11 - protein, 13 aa, Human immunodeficiency virus 1
GRKKRRQRRRPPQ

SEQ ID NO: 12 - protein, 16 aa, Drosophila sp.
RQIKIWFQNRRMKWKK

SEQ ID NO: 13 - RNA, 21 nt, synthetic construct
  source 1..21: mol_type = other RNA
cttacactgacatcaaagtga

SEQ ID NO: 14 - RNA, 21 nt, synthetic construct
  source 1..21: mol_type = other RNA
tgacatcaaagtgattggtaa

SEQ ID NO: 15 - RNA, 21 nt, synthetic construct
  source 1..21: mol_type = other RNA
ccatcaagaaggttcttcaga

SEQ ID NO: 16 - RNA, 21 nt, synthetic construct
  source 1..21: mol_type = other RNA
aggttcttcaggacaaaagga

SEQ ID NO: 17 - RNA, 21 nt, synthetic construct
  source 1..21: mol_type = other RNA
ggttcttcaggacaaaaggta

SEQ ID NO: 18 - RNA, 21 nt, synthetic construct
  source 1..21: mol_type = other RNA
gttcttcaggacaaaaggtta

SEQ ID NO: 19 - RNA, 21 nt, synthetic construct
  source 1..21: mol_type = other RNA
agaactgcagattatgcgtaa

SEQ ID NO: 20 - RNA, 21 nt, synthetic construct
  source 1..21: mol_type = other RNA
tgcagattatgcgtaagctga

SEQ ID NO: 21 - RNA, 21 nt, synthetic construct
  source 1..21: mol_type = other RNA
tatcatctacatcaaggtgta

SEQ ID NO: 22 - RNA, 21 nt, synthetic construct
  source 1..21: mol_type = other RNA
tgtcctcaagctctgcgatta

SEQ ID NO: 23 - RNA, 21 nt, synthetic construct
  source 1..21: mol_type = other RNA
ctcaagctctgcgattttgga

SEQ ID NO: 24 - RNA, 21 nt, synthetic construct
  source 1..21: mol_type = other RNA
tcaagctctgcgattttggca

SEQ ID NO: 25 - RNA, 21 nt, synthetic construct
  source 1..21: mol_type = other RNA
caagctctgcgattttggcaa

SEQ ID NO: 26 - RNA, 21 nt, synthetic construct
  source 1..21: mol_type = other RNA
aagctctgcgattttggcaga

SEQ ID NO: 27 - RNA, 21 nt, synthetic construct
  source 1..21: mol_type = other RNA
cccaatgtgtcctacatctga

SEQ ID NO: 28 - RNA, 21 nt, synthetic construct
  source 1..21: mol_type = other RNA
tgctccagaactcatctttga

SEQ ID NO: 29 - RNA, 21 nt, synthetic construct
  source 1..21: mol_type = other RNA
gctccagaactcatctttgga

SEQ ID NO: 30 - RNA, 21 nt, synthetic construct
  source 1..21: mol_type = other RNA
ctccagaactcatctttggaa

SEQ ID NO: 31 - RNA, 21 nt, synthetic construct
  source 1..21: mol_type = other RNA
tccagaactcatctttggaga

SEQ ID NO: 32 - RNA, 21 nt, synthetic construct
  source 1..21: mol_type = other RNA
ccagaactcatctttggagca

SEQ ID NO: 33 - RNA, 21 nt, synthetic construct
  source 1..21: mol_type = other RNA
gagagatgaaccctaactata

SEQ ID NO: 34 - RNA, 21 nt, synthetic construct
  source 1..21: mol_type = other RNA
gacaaaggtgttcaaatctta

SEQ ID NO: 35 - RNA, 21 nt, synthetic construct
  source 1..21: mol_type = other RNA
gcccacagcttcttcgatgaa

SEQ ID NO: 36 - RNA, 21 nt, synthetic construct
  source 1..21: mol_type = other RNA
agcttcttcgatgaactgcga

SEQ ID NO: 37 - RNA, 21 nt, synthetic construct
  source 1..21: mol_type = other RNA
ccatcctcacaagctttaaca

SEQ ID NO: 38 - RNA, 21 nt, synthetic construct
  source 1..21: mol_type = other RNA
catcctcacaagctttaacta

SEQ ID NO: 39 - RNA, 21 nt, synthetic construct
  source 1..21: mol_type = other RNA
atcctcacaagctttaactga

SEQ ID NO: 40 - RNA, 21 nt, synthetic construct
  source 1..21: mol_type = other RNA
aagaggattttaactgtttga

SEQ ID NO: 41 - RNA, 21 nt, synthetic construct
  source 1..21: mol_type = other RNA
agaggattttaactgtttgta

SEQ ID NO: 42 - RNA, 21 nt, synthetic construct
  source 1..21: mol_type = other RNA
gaggattttaactgtttgtaa

SEQ ID NO: 43 - RNA, 21 nt, synthetic construct
  source 1..21: mol_type = other RNA
tgggtgtaaatagattgttaa

SEQ ID NO: 44 - RNA, 21 nt, synthetic construct
  source 1..21: mol_type = other RNA
gggtgtaaatagattgttata

SEQ ID NO: 45 - RNA, 21 nt, synthetic construct
  source 1..21: mol_type = other RNA
aattcacaccattcaacttga

SEQ ID NO: 46 - RNA, 21 nt, synthetic construct
  source 1..21: mol_type = other RNA
gtccctggtgtcttagtttca

SEQ ID NO: 47 - RNA, 21 nt, synthetic construct
  source 1..21: mol_type = other RNA
gtcttagtttccacagtaaga

SEQ ID NO: 48 - RNA, 21 nt, synthetic construct
  source 1..21: mol_type = other RNA
tcttagtttccacagtaagga

SEQ ID NO: 49 - RNA, 21 nt, synthetic construct
  source 1..21: mol_type = other RNA
ttagtttccacagtaaggtta

SEQ ID NO: 50 - RNA, 21 nt, synthetic construct
  source 1..21: mol_type = other RNA
agacctctgttcaataaatta

SEQ ID NO: 51 - RNA, 21 nt, synthetic construct
  source 1..21: mol_type = other RNA
acctctgttcaataaattata

SEQ ID NO: 52 - RNA, 21 nt, synthetic construct
  source 1..21: mol_type = other RNA
ctctgttcaataaattattga

SEQ ID NO: 53 - RNA, 21 nt, synthetic construct
  source 1..21: mol_type = other RNA
tctgttcaataaattattgga

SEQ ID NO: 54 - RNA, 21 nt, synthetic construct
  source 1..21: mol_type = other RNA
ctgttcaataaattattggca

SEQ ID NO: 55 - RNA, 21 nt, synthetic construct
  source 1..21: mol_type = other RNA
tgttcaataaattattggcaa

SEQ ID NO: 56 - RNA, 21 nt, synthetic construct
  source 1..21: mol_type = other RNA
ttcaataaattattggcatga

SEQ ID NO: 57 - RNA, 23 nt, synthetic construct
  source 1..23: mol_type = other RNA
tcactttgatgtcagtgtaagcc

SEQ ID NO: 58 - RNA, 23 nt, synthetic construct
  source 1..23: mol_type = other RNA
ttaccaatcactttgatgtcagt

SEQ ID NO: 59 - RNA, 23 nt, synthetic construct
  source 1..23: mol_type = other RNA
tctgaagaaccttcttgatggcc

SEQ ID NO: 60 - RNA, 23 nt, synthetic construct
  source 1..23: mol_type = other RNA
tccttttgtcctgaagaaccttc

SEQ ID NO: 61 - RNA, 23 nt, synthetic construct
  source 1..23: mol_type = other RNA
taccttttgtcctgaagaacctt

SEQ ID NO: 62 - RNA, 23 nt, synthetic construct
  source 1..23: mol_type = other RNA
taaccttttgtcctgaagaacct

SEQ ID NO: 63 - RNA, 23 nt, synthetic construct
  source 1..23: mol_type = other RNA
ttacgcataatctgcagttctcg

SEQ ID NO: 64 - RNA, 23 nt, synthetic construct
  source 1..23: mol_type = other RNA
tcagcttacgcataatctgcagt

SEQ ID NO: 65 - RNA, 23 nt, synthetic construct
  source 1..23: mol_type = other RNA
tacaccttgatgtagatgatagg

SEQ ID NO: 66 - RNA, 23 nt, synthetic construct
  source 1..23: mol_type = other RNA
taatcgcagagcttgaggacagc

SEQ ID NO: 67 - RNA, 23 nt, synthetic construct
  source 1..23: mol_type = other RNA
tccaaaatcgcagagcttgagga

SEQ ID NO: 68 - RNA, 23 nt, synthetic construct
  source 1..23: mol_type = other RNA
tgccaaaatcgcagagcttgagg

SEQ ID NO: 69 - RNA, 23 nt, synthetic construct
  source 1..23: mol_type = other RNA
ttgccaaaatcgcagagcttgag

SEQ ID NO: 70 - RNA, 23 nt, synthetic construct
  source 1..23: mol_type = other RNA
tctgccaaaatcgcagagcttga

SEQ ID NO: 71 - RNA, 23 nt, synthetic construct
  source 1..23: mol_type = other RNA
tcagatgtaggacacattgggct

SEQ ID NO: 72 - RNA, 23 nt, synthetic construct
  source 1..23: mol_type = other RNA
tcaaagatgagttctggagcacg

SEQ ID NO: 73 - RNA, 23 nt, synthetic construct
  source 1..23: mol_type = other RNA
tccaaagatgagttctggagcac

SEQ ID NO: 74 - RNA, 23 nt, synthetic construct
  source 1..23: mol_type = other RNA
ttccaaagatgagttctggagca

SEQ ID NO: 75 - RNA, 23 nt, synthetic construct
  source 1..23: mol_type = other RNA
tctccaaagatgagttctggagc

SEQ ID NO: 76 - RNA, 23 nt, synthetic construct
  source 1..23: mol_type = other RNA
tgctccaaagatgagttctggag

SEQ ID NO: 77 - RNA, 23 nt, synthetic construct
  source 1..23: mol_type = other RNA
tatagttagggttcatctctcgg

SEQ ID NO: 78 - RNA, 23 nt, synthetic construct
  source 1..23: mol_type = other RNA
taagatttgaacacctttgtcca

SEQ ID NO: 79 - RNA, 23 nt, synthetic construct
  source 1..23: mol_type = other RNA
ttcatcgaagaagctgtgggcac

SEQ ID NO: 80 - RNA, 23 nt, synthetic construct
  source 1..23: mol_type = other RNA
tcgcagttcatcgaagaagctgt

SEQ ID NO: 81 - RNA, 23 nt, synthetic construct
  source 1..23: mol_type = other RNA
tgttaaagcttgtgaggatgggt

SEQ ID NO: 82 - RNA, 23 nt, synthetic construct
  source 1..23: mol_type = other RNA
tagttaaagcttgtgaggatggg

SEQ ID NO: 83 - RNA, 23 nt, synthetic construct
  source 1..23: mol_type = other RNA
tcagttaaagcttgtgaggatgg

SEQ ID NO: 84 - RNA, 23 nt, synthetic construct
  source 1..23: mol_type = other RNA
tcaaacagttaaaatcctcttta

SEQ ID NO: 85 - RNA, 23 nt, synthetic construct
  source 1..23: mol_type = other RNA
tacaaacagttaaaatcctcttt

SEQ ID NO: 86 - RNA, 23 nt, synthetic construct
  source 1..23: mol_type = other RNA
ttacaaacagttaaaatcctctt

SEQ ID NO: 87 - RNA, 23 nt, synthetic construct
  source 1..23: mol_type = other RNA
ttaacaatctatttacacccagg

SEQ ID NO: 88 - RNA, 23 nt, synthetic construct
  source 1..23: mol_type = other RNA
tataacaatctatttacacccag

SEQ ID NO: 89 - RNA, 23 nt, synthetic construct
  source 1..23: mol_type = other RNA
tcaagttgaatggtgtgaattga

SEQ ID NO: 90 - RNA, 23 nt, synthetic construct
  source 1..23: mol_type = other RNA
tgaaactaagacaccagggactc

SEQ ID NO: 91 - RNA, 23 nt, synthetic construct
  source 1..23: mol_type = other RNA
tcttactgtggaaactaagacac

SEQ ID NO: 92 - RNA, 23 nt, synthetic construct
  source 1..23: mol_type = other RNA
tccttactgtggaaactaagaca

SEQ ID NO: 93 - RNA, 23 nt, synthetic construct
  source 1..23: mol_type = other RNA
taaccttactgtggaaactaaga

SEQ ID NO: 94 - RNA, 23 nt, synthetic construct
  source 1..23: mol_type = other RNA
taatttattgaacagaggtctgt

SEQ ID NO: 95 - RNA, 23 nt, synthetic construct
  source 1..23: mol_type = other RNA
tataatttattgaacagaggtct

SEQ ID NO: 96 - RNA, 23 nt, synthetic construct
  source 1..23: mol_type = other RNA
tcaataatttattgaacagaggt

SEQ ID NO: 97 - RNA, 23 nt, synthetic construct
  source 1..23: mol_type = other RNA
tccaataatttattgaacagagg

SEQ ID NO: 98 - RNA, 23 nt, synthetic construct
  source 1..23: mol_type = other RNA
tgccaataatttattgaacagag

SEQ ID NO: 99 - RNA, 23 nt, synthetic construct
  source 1..23: mol_type = other RNA
ttgccaataatttattgaacaga

SEQ ID NO: 100 - RNA, 23 nt, synthetic construct
  source 1..23: mol_type = other RNA
tcatgccaataatttattgaaca

SEQ ID NO: 101 - RNA, 21 nt, synthetic construct
  source 1..21: mol_type = other RNA
  modified_base 1: mod_base = OTHER; note = 2'-O-methylcytidine-3'-phosphorothioate
  modified_base 2: mod_base = OTHER; note = 2'-O-methyluridine-3'-phosphorothioate
  modified_base 3: mod_base = OTHER; note = 2'-O-methyluridine-3'-phosphate
  modified_base 4: mod_base = OTHER; note = 2'-O-methyladenosine-3'-phosphate
  modified_base 5: mod_base = OTHER; note = 2'-O-methylcytidine-3'-phosphate
  modified_base 6: mod_base = OTHER; note = 2'-O-hexadecyl-adenosine-3'-phosphate
  modified_base 7: mod_base = OTHER; note = 2'-deoxy-2'-fluorocytidine-3'-phosphate
  modified_base 8: mod_base = OTHER; note = 2'-O-methyluridine-3'-phosphate
  modified_base 9: mod_base = OTHER; note = 2'-deoxy-2'-fluoroguanosine-3'-phosphate
  modified_base 10: mod_base = OTHER; note = 2'-deoxy-2'-fluoroadenosine-3'-phosphate
  modified_base 11: mod_base = OTHER; note = 2'-deoxy-2'-fluorocytidine-3'-phosphate
  modified_base 12: mod_base = OTHER; note = 2'-O-methyladenosine-3'-phosphate
  modified_base 13: mod_base = OTHER; note = 2'-O-methyluridine-3'-phosphate
  modified_base 14: mod_base = OTHER; note = 2'-O-methylcytidine-3'-phosphate
  modified_base 15: mod_base = OTHER; note = 2'-O-methyladenosine-3'-phosphate
  modified_base 16: mod_base = OTHER; note = 2'-O-methyladenosine-3'-phosphate
  modified_base 17: mod_base = OTHER; note = 2'-O-methyladenosine-3'-phosphate
  modified_base 18: mod_base = OTHER; note = 2'-O-methylguanosine-3'-phosphate
  modified_base 19: mod_base = OTHER; note = 2'-O-methyluridine-3'-phosphate
  modified_base 20: mod_base = OTHER; note = 2'-O-methylguanosine-3'-phosphate
  modified_base 21: mod_base = OTHER; note = 2'-O-methyladenosine-3'-phosphate ((2S,4R)-1-[29-[[2-(acetylamino)-2-deoxy-beta-D-galactopyra nosyl]oxy]-14,14-bis[[3-[[3-[[5-[[2-(acetylamino)-2-deoxy-b eta-D-galactopyranosyl]oxy]-1-oxopentyl]amino]propyl]amino] -3-oxopropoxy]methyl]-1,12,19,25-tetraoxo-16-oxa-13,20,24-t riazanonacos-1-yl]-4-hydroxy-2-pyrrolidinyl)methyl ester
cttacactgacatcaaagtga

SEQ ID NO: 102 - RNA, 21 nt, synthetic construct
  source 1..21: mol_type = other RNA
  modified_base 1: mod_base = OTHER; note = 2'-O-methyluridine-3'-phosphorothioate
  modified_base 2: mod_base = OTHER; note = 2'-O-methylguanosine-3'-phosphorothioate
  modified_base 3: mod_base = OTHER; note = 2'-O-methyladenosine-3'-phosphate
  modified_base 4: mod_base = OTHER; note = 2'-O-methylcytidine-3'-phosphate
  modified_base 5: mod_base = OTHER; note = 2'-O-methyladenosine-3'-phosphate
  modified_base 6: mod_base = OTHER; note = 2'-O-hexadecyl-uridine-3'-phosphate
  modified_base 7: mod_base = OTHER; note = 2'-deoxy-2'-fluorocytidine-3'-phosphate
  modified_base 8: mod_base = OTHER; note = 2'-O-methyladenosine-3'-phosphate
  modified_base 9: mod_base = OTHER; note = 2'-deoxy-2'-fluoroadenosine-3'-phosphate
  modified_base 10: mod_base = OTHER; note = 2'-deoxy-2'-fluoroadenosine-3'-phosphate
  modified_base 11: mod_base = OTHER; note = 2'-deoxy-2'-fluoroguanosine-3'-phosphate
  modified_base 12: mod_base = OTHER; note = 2'-O-methyluridine-3'-phosphate
  modified_base 13: mod_base = OTHER; note = 2'-O-methylguanosine-3'-phosphate
  modified_base 14: mod_base = OTHER; note = 2'-O-methyladenosine-3'-phosphate
  modified_base 15: mod_base = OTHER; note = 2'-O-methyluridine-3'-phosphate
  modified_base 16: mod_base = OTHER; note = 2'-O-methyluridine-3'-phosphate
  modified_base 17: mod_base = OTHER; note = 2'-O-methylguanosine-3'-phosphate
  modified_base 18: mod_base = OTHER; note = 2'-O-methylguanosine-3'-phosphate
  modified_base 19: mod_base = OTHER; note = 2'-O-methyluridine-3'-phosphate
  modified_base 20: mod_base = OTHER; note = 2'-O-methyladenosine-3'-phosphate
  modified_base 21: mod_base = OTHER; note = 2'-O-methyladenosine-3'-phosphate ((2S,4R)-1-[29-[[2-(acetylamino)-2-deoxy-beta-D-galactopyra nosyl]oxy]-14,14-bis[[3-[[3-[[5-[[2-(acetylamino)-2-deoxy-b eta-D-galactopyranosyl]oxy]-1-oxopentyl]amino]propyl]amino] -3-oxopropoxy]methyl]-1,12,19,25-tetraoxo-16-oxa-13,20,24-t riazanonacos-1-yl]-4-hydroxy-2-pyrrolidinyl)methyl ester
tgacatcaaagtgattggtaa

SEQ ID NO: 103 - RNA, 21 nt, synthetic construct
  source 1..21: mol_type = other RNA
  modified_base 1: mod_base = OTHER; note = 2'-O-methylcytidine-3'-phosphorothioate
  modified_base 2: mod_base = OTHER; note = 2'-O-methylcytidine-3'-phosphorothioate
  modified_base 3: mod_base = OTHER; note = 2'-O-methyladenosine-3'-phosphate
  modified_base 4: mod_base = OTHER; note = 2'-O-methyluridine-3'-phosphate
  modified_base 5: mod_base = OTHER; note = 2'-O-methylcytidine-3'-phosphate
  modified_base 6: mod_base = OTHER; note = 2'-O-hexadecyl-adenosine-3'-phosphate
  modified_base 7: mod_base = OTHER; note = 2'-deoxy-2'-fluoroadenosine-3'-phosphate
  modified_base 8: mod_base = OTHER; note = 2'-O-methylguanosine-3'-phosphate
  modified_base 9: mod_base = OTHER; note = 2'-deoxy-2'-fluoroadenosine-3'-phosphate
  modified_base 10: mod_base = OTHER; note = 2'-deoxy-2'-fluoroadenosine-3'-phosphate
  modified_base 11: mod_base = OTHER; note = 2'-deoxy-2'-fluoroguanosine-3'-phosphate
  modified_base 12: mod_base = OTHER; note = 2'-O-methylguanosine-3'-phosphate
  modified_base 13: mod_base = OTHER; note = 2'-O-methyluridine-3'-phosphate
  modified_base 14: mod_base = OTHER; note = 2'-O-methyluridine-3'-phosphate
  modified_base 15: mod_base = OTHER; note = 2'-O-methylcytidine-3'-phosphate
  modified_base 16: mod_base = OTHER; note = 2'-O-methyluridine-3'-phosphate
  modified_base 17: mod_base = OTHER; note = 2'-O-methyluridine-3'-phosphate
  modified_base 18: mod_base = OTHER; note = 2'-O-methylcytidine-3'-phosphate
  modified_base 19: mod_base = OTHER; note = 2'-O-methyladenosine-3'-phosphate
  modified_base 20: mod_base = OTHER; note = 2'-O-methylguanosine-3'-phosphate
  modified_base 21: mod_base = OTHER; note = 2'-O-methyladenosine-3'-phosphate ((2S,4R)-1-[29-[[2-(acetylamino)-2-deoxy-beta-D-galactopyra nosyl]oxy]-14,14-bis[[3-[[3-[[5-[[2-(acetylamino)-2-deoxy-b eta-D-galactopyranosyl]oxy]-1-oxopentyl]amino]propyl]amino] -3-oxopropoxy]methyl]-1,12,19,25-tetraoxo-16-oxa-13,20,24-t riazanonacos-1-yl]-4-hydroxy-2-pyrrolidinyl)methyl ester
ccatcaagaaggttcttcaga

SEQ ID NO: 104 - RNA, 21 nt, synthetic construct
  source 1..21: mol_type = other RNA
  modified_base 1: mod_base = OTHER; note = 2'-O-methyladenosine-3'-phosphorothioate
  modified_base 2: mod_base = OTHER; note = 2'-O-methylguanosine-3'-phosphorothioate
  modified_base 3: mod_base = OTHER; note = 2'-O-methylguanosine-3'-phosphate
  modified_base 4: mod_base = OTHER; note = 2'-O-methyluridine-3'-phosphate
  modified_base 5: mod_base = OTHER; note = 2'-O-methyluridine-3'-phosphate
  modified_base 6: mod_base = OTHER; note = 2'-O-hexadecyl-cytidine-3'-phosphate
  modified_base 7: mod_base = OTHER; note = 2'-deoxy-2'-fluorouridine-3'-phosphate
  modified_base 8: mod_base = OTHER; note = 2'-O-methyluridine-3'-phosphate
  modified_base 9: mod_base = OTHER; note = 2'-deoxy-2'-fluorocytidine-3'-phosphate
  modified_base 10: mod_base = OTHER; note = 2'-deoxy-2'-fluoroadenosine-3'-phosphate
  modified_base 11: mod_base = OTHER; note = 2'-deoxy-2'-fluoroguanosine-3'-phosphate
  modified_base 12: mod_base = OTHER; note = 2'-O-methylguanosine-3'-phosphate
  modified_base 13: mod_base = OTHER; note = 2'-O-methyladenosine-3'-phosphate
  modified_base 14: mod_base = OTHER; note = 2'-O-methylcytidine-3'-phosphate
  modified_base 15: mod_base = OTHER; note = 2'-O-methyladenosine-3'-phosphate
  modified_base 16: mod_base = OTHER; note = 2'-O-methyladenosine-3'-phosphate
  modified_base 17: mod_base = OTHER; note = 2'-O-methyladenosine-3'-phosphate
  modified_base 18: mod_base = OTHER; note = 2'-O-methyladenosine-3'-phosphate
  modified_base 19: mod_base = OTHER; note = 2'-O-methylguanosine-3'-phosphate
  modified_base 20: mod_base = OTHER; note = 2'-O-methylguanosine-3'-phosphate
  modified_base 21: mod_base = OTHER; note = 2'-O-methyladenosine-3'-phosphate ((2S,4R)-1-[29-[[2-(acetylamino)-2-deoxy-beta-D-galactopyra nosyl]oxy]-14,14-bis[[3-[[3-[[5-[[2-(acetylamino)-2-deoxy-b eta-D-galactopyranosyl]oxy]-1-oxopentyl]amino]propyl]amino] -3-oxopropoxy]methyl]-1,12,19,25-tetraoxo-16-oxa-13,20,24-t riazanonacos-1-yl]-4-hydroxy-2-pyrrolidinyl)methyl ester
aggttcttcaggacaaaagga

SEQ ID NO: 105 - RNA, 21 nt, synthetic construct
  source 1..21: mol_type = other RNA
  modified_base 1: mod_base = OTHER; note = 2'-O-methylguanosine-3'-phosphorothioate
  modified_base 2: mod_base = OTHER; note = 2'-O-methylguanosine-3'-phosphorothioate
  modified_base 3: mod_base = OTHER; note = 2'-O-methyluridine-3'-phosphate
  modified_base 4: mod_base = OTHER; note = 2'-O-methyluridine-3'-phosphate
  modified_base 5: mod_base = OTHER; note = 2'-O-methylcytidine-3'-phosphate
  modified_base 6: mod_base = OTHER; note = 2'-O-hexadecyl-uridine-3'-phosphate
  modified_base 7: mod_base = OTHER; note = 2'-deoxy-2'-fluorouridine-3'-phosphate
  modified_base 8: mod_base = OTHER; note = 2'-O-methylcytidine-3'-phosphate
  modified_base 9: mod_base = OTHER; note = 2'-deoxy-2'-fluoroadenosine-3'-phosphate
  modified_base 10: mod_base = OTHER; note = 2'-deoxy-2'-fluoroguanosine-3'-phosphate
  modified_base 11: mod_base = OTHER; note = 2'-deoxy-2'-fluoroguanosine-3'-phosphate
  modified_base 12: mod_base = OTHER; note = 2'-O-methyladenosine-3'-phosphate
  modified_base 13: mod_base = OTHER; note = 2'-O-methylcytidine-3'-phosphate
  modified_base 14: mod_base = OTHER; note = 2'-O-methyladenosine-3'-phosphate
  modified_base 15: mod_base = OTHER; note = 2'-O-methyladenosine-3'-phosphate
  modified_base 16: mod_base = OTHER; note = 2'-O-methyladenosine-3'-phosphate
  modified_base 17: mod_base = OTHER; note = 2'-O-methyladenosine-3'-phosphate
  modified_base 18: mod_base = OTHER; note = 2'-O-methylguanosine-3'-phosphate
  modified_base 19: mod_base = OTHER; note = 2'-O-methylguanosine-3'-phosphate
  modified_base 20: mod_base = OTHER; note = 2'-O-methyluridine-3'-phosphate
  modified_base 21: mod_base = OTHER; note = 2'-O-methyladenosine-3'-phosphate ((2S,4R)-1-[29-[[2-(acetylamino)-2-deoxy-beta-D-galactopyra nosyl]oxy]-14,14-bis[[3-[[3-[[5-[[2-(acetylamino)-2-deoxy-b eta-D-galactopyranosyl]oxy]-1-oxopentyl]amino]propyl]amino] -3-oxopropoxy]methyl]-1,12,19,25-tetraoxo-16-oxa-13,20,24-t riazanonacos-1-yl]-4-hydroxy-2-pyrrolidinyl)methyl ester
ggttcttcaggacaaaaggta

SEQ ID NO: 106 - RNA, 21 nt, synthetic construct
  source 1..21: mol_type = other RNA
  modified_base 1: mod_base = OTHER; note = 2'-O-methylguanosine-3'-phosphorothioate
  modified_base 2: mod_base = OTHER; note = 2'-O-methyluridine-3'-phosphorothioate
  modified_base 3: mod_base = OTHER; note = 2'-O-methyluridine-3'-phosphate
  modified_base 4: mod_base = OTHER; note = 2'-O-methylcytidine-3'-phosphate
  modified_base 5: mod_base = OTHER; note = 2'-O-methyluridine-3'-phosphate
  modified_base 6: mod_base = OTHER; note = 2'-O-hexadecyl-uridine-3'-phosphate
  modified_base 7: mod_base = OTHER; note = 2'-deoxy-2'-fluorocytidine-3'-phosphate
  modified_base 8: mod_base = OTHER; note = 2'-O-methyladenosine-3'-phosphate
  modified_base 9: mod_base = OTHER; note = 2'-deoxy-2'-fluoroguanosine-3'-phosphate
  modified_base 10: mod_base = OTHER; note = 2'-deoxy-2'-fluoroguanosine-3'-phosphate
  modified_base 11: mod_base = OTHER; note = 2'-deoxy-2'-fluoroadenosine-3'-phosphate
  modified_base 12: mod_base = OTHER; note = 2'-O-methylcytidine-3'-phosphate
  modified_base 13: mod_base = OTHER; note = 2'-O-methyladenosine-3'-phosphate
  modified_base 14: mod_base = OTHER; note = 2'-O-methyladenosine-3'-phosphate
  modified_base 15: mod_base = OTHER; note = 2'-O-methyladenosine-3'-phosphate
  modified_base 16: mod_base = OTHER; note = 2'-O-methyladenosine-3'-phosphate
  modified_base 17: mod_base = OTHER; note = 2'-O-methylguanosine-3'-phosphate
  modified_base 18: mod_base = OTHER; note = 2'-O-methylguanosine-3'-phosphate
  modified_base 19: mod_base = OTHER; note = 2'-O-methyluridine-3'-phosphate
  modified_base 20: mod_base = OTHER; note = 2'-O-methyluridine-3'-phosphate
  modified_base 21: mod_base = OTHER; note = 2'-O-methyladenosine-3'-phosphate ((2S,4R)-1-[29-[[2-(acetylamino)-2-deoxy-beta-D-galactopyra nosyl]oxy]-14,14-bis[[3-[[3-[[5-[[2-(acetylamino)-2-deoxy-b eta-D-galactopyranosyl]oxy]-1-oxopentyl]amino]propyl]amino] -3-oxopropoxy]methyl]-1,12,19,25-tetraoxo-16-oxa-13,20,24-t riazanonacos-1-yl]-4-hydroxy-2-pyrrolidinyl)methyl ester
gttcttcaggacaaaaggtta

SEQ ID NO: 107 - RNA, 21 nt, synthetic construct
  source 1..21: mol_type = other RNA
  modified_base 1: mod_base = OTHER; note = 2'-O-methyladenosine-3'-phosphorothioate
  modified_base 2: mod_base = OTHER; note = 2'-O-methylguanosine-3'-phosphorothioate
  modified_base 3: mod_base = OTHER; note = 2'-O-methyladenosine-3'-phosphate
  modified_base 4: mod_base = OTHER; note = 2'-O-methyladenosine-3'-phosphate
  modified_base 5: mod_base = OTHER; note = 2'-O-methylcytidine-3'-phosphate
  modified_base 6: mod_base = OTHER; note = 2'-O-hexadecyl-uridine-3'-phosphate
  modified_base 7: mod_base = OTHER; note = 2'-deoxy-2'-fluoroguanosine-3'-phosphate
  modified_base 8: mod_base = OTHER; note = 2'-O-methylcytidine-3'-phosphate
  modified_base 9: mod_base = OTHER; note = 2'-deoxy-2'-fluoroadenosine-3'-phosphate
  modified_base 10: mod_base = OTHER; note = 2'-deoxy-2'-fluoroguanosine-3'-phosphate
  modified_base 11: mod_base = OTHER; note = 2'-deoxy-2'-fluoroadenosine-3'-phosphate
  modified_base 12: mod_base = OTHER; note = 2'-O-methyluridine-3'-phosphate
  modified_base 13: mod_base = OTHER; note = 2'-O-methyluridine-3'-phosphate
  modified_base 14: mod_base = OTHER; note = 2'-O-methyladenosine-3'-phosphate
  modified_base 15: mod_base = OTHER; note = 2'-O-methyluridine-3'-phosphate
  modified_base 16: mod_base = OTHER; note = 2'-O-methylguanosine-3'-phosphate
  modified_base 17: mod_base = OTHER; note = 2'-O-methylcytidine-3'-phosphate
  modified_base 18: mod_base = OTHER; note = 2'-O-methylguanosine-3'-phosphate
  modified_base 19: mod_base = OTHER; note = 2'-O-methyluridine-3'-phosphate
  modified_base 20: mod_base = OTHER; note = 2'-O-methyladenosine-3'-phosphate
  modified_base 21: mod_base = OTHER; note = 2'-O-methyladenosine-3'-phosphate ((2S,4R)-1-[29-[[2-(acetylamino)-2-deoxy-beta-D-galactopyra nosyl]oxy]-14,14-bis[[3-[[3-[[5-[[2-(acetylamino)-2-deoxy-b eta-D-galactopyranosyl]oxy]-1-oxopentyl]amino]propyl]amino] -3-oxopropoxy]methyl]-1,12,19,25-tetraoxo-16-oxa-13,20,24-t riazanonacos-1-yl]-4-hydroxy-2-pyrrolidinyl)methyl ester
agaactgcagattatgcgtaa

SEQ ID NO: 108 - RNA, 21 nt, synthetic construct
  source 1..21: mol_type = other RNA
  modified_base 1: mod_base = OTHER; note = 2'-O-methyluridine-3'-phosphorothioate
  modified_base 2: mod_base = OTHER; note = 2'-O-methylguanosine-3'-phosphorothioate
  modified_base 3: mod_base = OTHER; note = 2'-O-methylcytidine-3'-phosphate
  modified_base 4: mod_base = OTHER; note = 2'-O-methyladenosine-3'-phosphate
  modified_base 5: mod_base = OTHER; note = 2'-O-methylguanosine-3'-phosphate
  modified_base 6: mod_base = OTHER; note = 2'-O-hexadecyl-adenosine-3'-phosphate
  modified_base 7: mod_base = OTHER; note = 2'-deoxy-2'-fluorouridine-3'-phosphate
  modified_base 8: mod_base = OTHER; note = 2'-O-methyluridine-3'-phosphate
  modified_base 9: mod_base = OTHER; note = 2'-deoxy-2'-fluoroadenosine-3'-phosphate
  modified_base 10: mod_base = OTHER; note = 2'-deoxy-2'-fluorouridine-3'-phosphate
  modified_base 11: mod_base = OTHER; note = 2'-deoxy-2'-fluoroguanosine-3'-phosphate
  modified_base 12: mod_base = OTHER; note = 2'-O-methylcytidine-3'-phosphate
  modified_base 13: mod_base = OTHER; note = 2'-O-methylguanosine-3'-phosphate
  modified_base 14: mod_base = OTHER; note = 2'-O-methyluridine-3'-phosphate
  modified_base 15: mod_base = OTHER; note = 2'-O-methyladenosine-3'-phosphate
  modified_base 16: mod_base = OTHER; note = 2'-O-methyladenosine-3'-phosphate
  modified_base 17: mod_base = OTHER; note = 2'-O-methylguanosine-3'-phosphate
  modified_base 18: mod_base = OTHER; note = 2'-O-methylcytidine-3'-phosphate
  modified_base 19: mod_base = OTHER; note = 2'-O-methyluridine-3'-phosphate
  modified_base 20: mod_base = OTHER; note = 2'-O-methylguanosine-3'-phosphate
  modified_base 21: mod_base = OTHER; note = 2'-O-methyladenosine-3'-phosphate ((2S,4R)-1-[29-[[2-(acetylamino)-2-deoxy-beta-D-galactopyra nosyl]oxy]-14,14-bis[[3-[[3-[[5-[[2-(acetylamino)-2-deoxy-b eta-D-galactopyranosyl]oxy]-1-oxopentyl]amino]propyl]amino] -3-oxopropoxy]methyl]-1,12,19,25-tetraoxo-16-oxa-13,20,24-t riazanonacos-1-yl]-4-hydroxy-2-pyrrolidinyl)methyl ester
tgcagattatgcgtaagctga

SEQ ID NO: 109 - RNA, 21 nt, synthetic construct
  source 1..21: mol_type = other RNA
  modified_base 1: mod_base = OTHER; note = 2'-O-methyluridine-3'-phosphorothioate
  modified_base 2: mod_base = OTHER; note = 2'-O-methyladenosine-3'-phosphorothioate
  modified_base 3: mod_base = OTHER; note = 2'-O-methyluridine-3'-phosphate
  modified_base 4: mod_base = OTHER; note = 2'-O-methylcytidine-3'-phosphate
  modified_base 5: mod_base = OTHER; note = 2'-O-methyladenosine-3'-phosphate
  modified_base 6: mod_base = OTHER; note = 2'-O-hexadecyl-uridine-3'-phosphate
  modified_base 7: mod_base = OTHER; note = 2'-deoxy-2'-fluorocytidine-3'-phosphate
  modified_base 8: mod_base = OTHER; note = 2'-O-methyluridine-3'-phosphate
  modified_base 9: mod_base = OTHER; note = 2'-deoxy-2'-fluoroadenosine-3'-phosphate
  modified_base 10: mod_base = OTHER; note = 2'-deoxy-2'-fluorocytidine-3'-phosphate
  modified_base 11: mod_base = OTHER; note = 2'-deoxy-2'-fluoroadenosine-3'-phosphate
  modified_base 12: mod_base = OTHER; note = 2'-O-methyluridine-3'-phosphate
  modified_base 13: mod_base = OTHER; note = 2'-O-methylcytidine-3'-phosphate
  modified_base 14: mod_base = OTHER; note = 2'-O-methyladenosine-3'-phosphate
  modified_base 15: mod_base = OTHER; note = 2'-O-methyladenosine-3'-phosphate
  modified_base 16: mod_base = OTHER; note = 2'-O-methylguanosine-3'-phosphate
  modified_base 17: mod_base = OTHER; note = 2'-O-methylguanosine-3'-phosphate
  modified_base 18: mod_base = OTHER; note = 2'-O-methyluridine-3'-phosphate
  modified_base 19: mod_base = OTHER; note = 2'-O-methylguanosine-3'-phosphate
  modified_base 20: mod_base = OTHER; note = 2'-O-methyluridine-3'-phosphate
  modified_base 21: mod_base = OTHER; note = 2'-O-methyladenosine-3'-phosphate ((2S,4R)-1-[29-[[2-(acetylamino)-2-deoxy-beta-D-galactopyra nosyl]oxy]-14,14-bis[[3-[[3-[[5-[[2-(acetylamino)-2-deoxy-b eta-D-galactopyranosyl]oxy]-1-oxopentyl]amino]propyl]amino] -3-oxopropoxy]methyl]-1,12,19,25-tetraoxo-16-oxa-13,20,24-t riazanonacos-1-yl]-4-hydroxy-2-pyrrolidinyl)methyl ester
tatcatctacatcaaggtgta

SEQ ID NO: 110 - RNA, 21 nt, synthetic construct
  source 1..21: mol_type = other RNA
  modified_base 1: mod_base = OTHER; note = 2'-O-methyluridine-3'-phosphorothioate
  modified_base 2: mod_base = OTHER; note = 2'-O-methylguanosine-3'-phosphorothioate
  modified_base 3: mod_base = OTHER; note = 2'-O-methyluridine-3'-phosphate
  modified_base 4: mod_base = OTHER; note = 2'-O-methylcytidine-3'-phosphate
  modified_base 5: mod_base = OTHER; note = 2'-O-methylcytidine-3'-phosphate
  modified_base 6: mod_base = OTHER; note = 2'-O-hexadecyl-uridine-3'-phosphate
  modified_base 7: mod_base = OTHER; note = 2'-deoxy-2'-fluorocytidine-3'-phosphate
  modified_base 8: mod_base = OTHER; note = 2'-O-methyladenosine-3'-phosphate
  modified_base 9: mod_base = OTHER; note = 2'-deoxy-2'-fluoroadenosine-3'-phosphate
  modified_base 10: mod_base = OTHER; note = 2'-deoxy-2'-fluoroguanosine-3'-phosphate
  modified_base 11: mod_base = OTHER; note = 2'-deoxy-2'-fluorocytidine-3'-phosphate
  modified_base 12: mod_base = OTHER; note = 2'-O-methyluridine-3'-phosphate
  modified_base 13: mod_base = OTHER; note = 2'-O-methylcytidine-3'-phosphate
  modified_base 14: mod_base = OTHER; note = 2'-O-methyluridine-3'-phosphate
  modified_base 15: mod_base = OTHER; note = 2'-O-methylguanosine-3'-phosphate
  modified_base 16: mod_base = OTHER; note = 2'-O-methylcytidine-3'-phosphate
  modified_base 17: mod_base = OTHER; note = 2'-O-methylguanosine-3'-phosphate
  modified_base 18: mod_base = OTHER; note = 2'-O-methyladenosine-3'-phosphate
  modified_base 19: mod_base = OTHER; note = 2'-O-methyluridine-3'-phosphate
  modified_base 20: mod_base = OTHER; note = 2'-O-methyluridine-3'-phosphate
  modified_base 21: mod_base = OTHER; note = 2'-O-methyladenosine-3'-phosphate ((2S,4R)-1-[29-[[2-(acetylamino)-2-deoxy-beta-D-galactopyra nosyl]oxy]-14,14-bis[[3-[[3-[[5-[[2-(acetylamino)-2-deoxy-b eta-D-galactopyranosyl]oxy]-1-oxopentyl]amino]propyl]amino] -3-oxopropoxy]methyl]-1,12,19,25-tetraoxo-16-oxa-13,20,24-t riazanonacos-1-yl]-4-hydroxy-2-pyrrolidinyl)methyl ester
tgtcctcaagctctgcgatta

SEQ ID NO: 111 - RNA, 21 nt, synthetic construct
  source 1..21: mol_type = other RNA
  modified_base 1: mod_base = OTHER; note = 2'-O-methylcytidine-3'-phosphorothioate
  modified_base 2: mod_base = OTHER; note = 2'-O-methyluridine-3'-phosphorothioate
  modified_base 3: mod_base = OTHER; note = 2'-O-methylcytidine-3'-phosphate
  modified_base 4: mod_base = OTHER; note = 2'-O-methyladenosine-3'-phosphate
  modified_base 5: mod_base = OTHER; note = 2'-O-methyladenosine-3'-phosphate
  modified_base 6: mod_base = OTHER; note = 2'-O-hexadecyl-guanosine-3'-phosphate
  modified_base 7: mod_base = OTHER; note = 2'-deoxy-2'-fluorocytidine-3'-phosphate
  modified_base 8: mod_base = OTHER; note = 2'-O-methyluridine-3'-phosphate
  modified_base 9: mod_base = OTHER; note = 2'-deoxy-2'-fluorocytidine-3'-phosphate
  modified_base 10: mod_base = OTHER; note = 2'-deoxy-2'-fluorouridine-3'-phosphate
  modified_base 11: mod_base = OTHER; note = 2'-deoxy-2'-fluoroguanosine-3'-phosphate
  modified_base 12: mod_base = OTHER; note = 2'-O-methylcytidine-3'-phosphate
  modified_base 13: mod_base = OTHER; note = 2'-O-methylguanosine-3'-phosphate
  modified_base 14: mod_base = OTHER; note = 2'-O-methyladenosine-3'-phosphate
  modified_base 15: mod_base = OTHER; note = 2'-O-methyluridine-3'-phosphate
  modified_base 16: mod_base = OTHER; note = 2'-O-methyluridine-3'-phosphate
  modified_base 17: mod_base = OTHER; note = 2'-O-methyluridine-3'-phosphate
  modified_base 18: mod_base = OTHER; note = 2'-O-methyluridine-3'-phosphate
  modified_base 19: mod_base = OTHER; note = 2'-O-methylguanosine-3'-phosphate
  modified_base 20: mod_base = OTHER; note = 2'-O-methylguanosine-3'-phosphate
  modified_base 21: mod_base = OTHER; note = 2'-O-methyladenosine-3'-phosphate ((2S,4R)-1-[29-[[2-(acetylamino)-2-deoxy-beta-D-galactopyra nosyl]oxy]-14,14-bis[[3-[[3-[[5-[[2-(acetylamino)-2-deoxy-b eta-D-galactopyranosyl]oxy]-1-oxopentyl]amino]propyl]amino] -3-oxopropoxy]methyl]-1,12,19,25-tetraoxo-16-oxa-13,20,24-t riazanonacos-1-yl]-4-hydroxy-2-pyrrolidinyl)methyl ester
ctcaagctctgcgattttgga

SEQ ID NO: 112 - RNA, 21 nt, synthetic construct
  source 1..21: mol_type = other RNA
  modified_base 1: mod_base = OTHER; note = 2'-O-methyluridine-3'-phosphorothioate
  modified_base 2: mod_base = OTHER; note = 2'-O-methylcytidine-3'-phosphorothioate
  modified_base 3: mod_base = OTHER; note = 2'-O-methyladenosine-3'-phosphate
  modified_base 4: mod_base = OTHER; note = 2'-O-methyladenosine-3'-phosphate
  modified_base 5: mod_base = OTHER; note = 2'-O-methylguanosine-3'-phosphate
  modified_base 6: mod_base = OTHER; note = 2'-O-hexadecyl-cytidine-3'-phosphate
  modified_base 7: mod_base = OTHER; note = 2'-deoxy-2'-fluorouridine-3'-phosphate
  modified_base 8: mod_base = OTHER; note = 2'-O-methylcytidine-3'-phosphate
  modified_base 9: mod_base = OTHER; note = 2'-deoxy-2'-fluorouridine-3'-phosphate
  modified_base 10: mod_base = OTHER; note = 2'-deoxy-2'-fluoroguanosine-3'-phosphate
  modified_base 11: mod_base = OTHER; note = 2'-deoxy-2'-fluorocytidine-3'-phosphate
  modified_base 12: mod_base = OTHER; note = 2'-O-methylguanosine-3'-phosphate
  modified_base 13: mod_base = OTHER; note = 2'-O-methyladenosine-3'-phosphate
  modified_base 14: mod_base = OTHER; note = 2'-O-methyluridine-3'-phosphate
  modified_base 15: mod_base = OTHER; note = 2'-O-methyluridine-3'-phosphate
  modified_base 16: mod_base = OTHER; note = 2'-O-methyluridine-3'-phosphate
  modified_base 17: mod_base = OTHER; note = 2'-O-methyluridine-3'-phosphate
  modified_base 18: mod_base = OTHER; note = 2'-O-methylguanosine-3'-phosphate
  modified_base 19: mod_base = OTHER; note = 2'-O-methylguanosine-3'-phosphate
  modified_base 20: mod_base = OTHER; note = 2'-O-methylcytidine-3'-phosphate
  modified_base 21: mod_base = OTHER; note = 2'-O-methyladenosine-3'-phosphate ((2S,4R)-1-[29-[[2-(acetylamino)-2-deoxy-beta-D-galactopyra nosyl]oxy]-14,14-bis[[3-[[3-[[5-[[2-(acetylamino)-2-deoxy-b eta-D-galactopyranosyl]oxy]-1-oxopentyl]amino]propyl]amino] -3-oxopropoxy]methyl]-1,12,19,25-tetraoxo-16-oxa-13,20,24-t riazanonacos-1-yl]-4-hydroxy-2-pyrrolidinyl)methyl ester
tcaagctctgcgattttggca

SEQ ID NO: 113 - RNA, 21 nt, synthetic construct
  source 1..21: mol_type = other RNA
  modified_base 1: mod_base = OTHER; note = 2'-O-methylcytidine-3'-phosphorothioate
  modified_base 2: mod_base = OTHER; note = 2'-O-methyladenosine-3'-phosphorothioate
  modified_base 3: mod_base = OTHER; note = 2'-O-methyladenosine-3'-phosphate
  modified_base 4: mod_base = OTHER; note = 2'-O-methylguanosine-3'-phosphate
  modified_base 5: mod_base = OTHER; note = 2'-O-methylcytidine-3'-phosphate
  modified_base 6: mod_base = OTHER; note = 2'-O-hexadecyl-uridine-3'-phosphate
  modified_base 7: mod_base = OTHER; note = 2'-deoxy-2'-fluorocytidine-3'-phosphate
  modified_base 8: mod_base = OTHER; note = 2'-O-methyluridine-3'-phosphate
  modified_base 9: mod_base = OTHER; note = 2'-deoxy-2'-fluoroguanosine-3'-phosphate
  modified_base 10: mod_base = OTHER; note = 2'-deoxy-2'-fluorocytidine-3'-phosphate
  modified_base 11: mod_base = OTHER; note = 2'-deoxy-2'-fluoroguanosine-3'-phosphate
  modified_base 12: mod_base = OTHER; note = 2'-O-methyladenosine-3'-phosphate
  modified_base 13: mod_base = OTHER; note = 2'-O-methyluridine-3'-phosphate
  modified_base 14: mod_base = OTHER; note = 2'-O-methyluridine-3'-phosphate
  modified_base 15: mod_base = OTHER; note = 2'-O-methyluridine-3'-phosphate
  modified_base 16: mod_base = OTHER; note = 2'-O-methyluridine-3'-phosphate
  modified_base 17: mod_base = OTHER; note = 2'-O-methylguanosine-3'-phosphate
  modified_base 18: mod_base = OTHER; note = 2'-O-methylguanosine-3'-phosphate
  modified_base 19: mod_base = OTHER; note = 2'-O-methylcytidine-3'-phosphate
  modified_base 20: mod_base = OTHER; note = 2'-O-methyladenosine-3'-phosphate
  modified_base 21: mod_base = OTHER; note = 2'-O-methyladenosine-3'-phosphate ((2S,4R)-1-[29-[[2-(acetylamino)-2-deoxy-beta-D-galactopyra nosyl]oxy]-14,14-bis[[3-[[3-[[5-[[2-(acetylamino)-2-deoxy-b eta-D-galactopyranosyl]oxy]-1-oxopentyl]amino]propyl]amino] -3-oxopropoxy]methyl]-1,12,19,25-tetraoxo-16-oxa-13,20,24-t riazanonacos-1-yl]-4-hydroxy-2-pyrrolidinyl)methyl ester
caagctctgcgattttggcaa

SEQ ID NO: 114 - RNA, 21 nt, synthetic construct
  source 1..21: mol_type = other RNA
  modified_base 1: mod_base = OTHER; note = 2'-O-methyladenosine-3'-phosphorothioate
  modified_base 2: mod_base = OTHER; note = 2'-O-methyladenosine-3'-phosphorothioate
  modified_base 3: mod_base = OTHER; note = 2'-O-methylguanosine-3'-phosphate
  modified_base 4: mod_base = OTHER; note = 2'-O-methylcytidine-3'-phosphate
  modified_base 5: mod_base = OTHER; note = 2'-O-methyluridine-3'-phosphate
  modified_base 6: mod_base = OTHER; note = 2'-O-hexadecyl-cytidine-3'-phosphate
  modified_base 7: mod_base = OTHER; note = 2'-deoxy-2'-fluorouridine-3'-phosphate
  modified_base 8: mod_base = OTHER; note = 2'-O-methylguanosine-3'-phosphate
  modified_base 9: mod_base = OTHER; note = 2'-deoxy-2'-fluorocytidine-3'-phosphate
  modified_base 10: mod_base = OTHER; note = 2'-deoxy-2'-fluoroguanosine-3'-phosphate
  modified_base 11: mod_base = OTHER; note = 2'-deoxy-2'-fluoroadenosine-3'-phosphate
  modified_base 12: mod_base = OTHER; note = 2'-O-methyluridine-3'-phosphate
  modified_base 13: mod_base = OTHER; note = 2'-O-methyluridine-3'-phosphate
  modified_base 14: mod_base = OTHER; note = 2'-O-methyluridine-3'-phosphate
  modified_base 15: mod_base = OTHER; note = 2'-O-methyluridine-3'-phosphate
  modified_base 16: mod_base = OTHER; note = 2'-O-methylguanosine-3'-phosphate
  modified_base 17: mod_base = OTHER; note = 2'-O-methylguanosine-3'-phosphate
  modified_base 18: mod_base = OTHER; note = 2'-O-methylcytidine-3'-phosphate
  modified_base 19: mod_base = OTHER; note = 2'-O-methyladenosine-3'-phosphate
  modified_base 20: mod_base = OTHER; note = 2'-O-methylguanosine-3'-phosphate
  modified_base 21: mod_base = OTHER; note = 2'-O-methyladenosine-3'-phosphate ((2S,4R)-1-[29-[[2-(acetylamino)-2-deoxy-beta-D-galactopyra nosyl]oxy]-14,14-bis[[3-[[3-[[5-[[2-(acetylamino)-2-deoxy-b eta-D-galactopyranosyl]oxy]-1-oxopentyl]amino]propyl]amino] -3-oxopropoxy]methyl]-1,12,19,25-tetraoxo-16-oxa-13,20,24-t riazanonacos-1-yl]-4-hydroxy-2-pyrrolidinyl)methyl ester
aagctctgcgattttggcaga

SEQ ID NO: 115 - RNA, 21 nt, synthetic construct
  source 1..21: mol_type = other RNA
  modified_base 1: mod_base = OTHER; note = 2'-O-methylcytidine-3'-phosphorothioate
  modified_base 2: mod_base = OTHER; note = 2'-O-methylcytidine-3'-phosphorothioate
  modified_base 3: mod_base = OTHER; note = 2'-O-methylcytidine-3'-phosphate
  modified_base 4: mod_base = OTHER; note = 2'-O-methyladenosine-3'-phosphate
  modified_base 5: mod_base = OTHER; note = 2'-O-methyladenosine-3'-phosphate
  modified_base 6: mod_base = OTHER; note = 2'-O-hexadecyl-uridine-3'-phosphate
  modified_base 7: mod_base = OTHER; note = 2'-deoxy-2'-fluoroguanosine-3'-phosphate
  modified_base 8: mod_base = OTHER; note = 2'-O-methyluridine-3'-phosphate
  modified_base 9: mod_base = OTHER; note = 2'-deoxy-2'-fluoroguanosine-3'-phosphate
  modified_base 10: mod_base = OTHER; note = 2'-deoxy-2'-fluorouridine-3'-phosphate
  modified_base 11: mod_base = OTHER; note = 2'-deoxy-2'-fluorocytidine-3'-phosphate
  modified_base 12: mod_base = OTHER; note = 2'-O-methylcytidine-3'-phosphate
  modified_base 13: mod_base = OTHER; note = 2'-O-methyluridine-3'-phosphate
  modified_base 14: mod_base = OTHER; note = 2'-O-methyladenosine-3'-phosphate
  modified_base 15: mod_base = OTHER; note = 2'-O-methylcytidine-3'-phosphate
  modified_base 16: mod_base = OTHER; note = 2'-O-methyladenosine-3'-phosphate
  modified_base 17: mod_base = OTHER; note = 2'-O-methyluridine-3'-phosphate
  modified_base 18: mod_base = OTHER; note = 2'-O-methylcytidine-3'-phosphate
  modified_base 19: mod_base = OTHER; note = 2'-O-methyluridine-3'-phosphate
  modified_base 20: mod_base = OTHER; note = 2'-O-methylguanosine-3'-phosphate
  modified_base 21: mod_base = OTHER; note = 2'-O-methyladenosine-3'-phosphate ((2S,4R)-1-[29-[[2-(acetylamino)-2-deoxy-beta-D-galactopyra nosyl]oxy]-14,14-bis[[3-[[3-[[5-[[2-(acetylamino)-2-deoxy-b eta-D-galactopyranosyl]oxy]-1-oxopentyl]amino]propyl]amino] -3-oxopropoxy]methyl]-1,12,19,25-tetraoxo-16-oxa-13,20,24-t riazanonacos-1-yl]-4-hydroxy-2-pyrrolidinyl)methyl ester
cccaatgtgtcctacatctga

SEQ ID NO: 116 - RNA, 21 nt, synthetic construct
  source 1..21: mol_type = other RNA
  modified_base 1: mod_base = OTHER; note = 2'-O-methyluridine-3'-phosphorothioate
  modified_base 2: mod_base = OTHER; note = 2'-O-methylguanosine-3'-phosphorothioate
  modified_base 3: mod_base = OTHER; note = 2'-O-methylcytidine-3'-phosphate
  modified_base 4: mod_base = OTHER; note = 2'-O-methyluridine-3'-phosphate
  modified_base 5: mod_base = OTHER; note = 2'-O-methylcytidine-3'-phosphate
  modified_base 6: mod_base = OTHER; note = 2'-O-hexadecyl-cytidine-3'-phosphate
  modified_base 7: mod_base = OTHER; note = 2'-deoxy-2'-fluoroadenosine-3'-phosphate
  modified_base 8: mod_base = OTHER; note = 2'-O-methylguanosine-3'-phosphate
  modified_base 9: mod_base = OTHER; note = 2'-deoxy-2'-fluoroadenosine-3'-phosphate
  modified_base 10: mod_base = OTHER; note = 2'-deoxy-2'-fluoroadenosine-3'-phosphate
  modified_base 11: mod_base = OTHER; note = 2'-deoxy-2'-fluorocytidine-3'-phosphate
  modified_base 12: mod_base = OTHER; note = 2'-O-methyluridine-3'-phosphate
  modified_base 13: mod_base = OTHER; note = 2'-O-methylcytidine-3'-phosphate
  modified_base 14: mod_base = OTHER; note = 2'-O-methyladenosine-3'-phosphate
  modified_base 15: mod_base = OTHER; note = 2'-O-methyluridine-3'-phosphate
  modified_base 16: mod_base = OTHER; note = 2'-O-methylcytidine-3'-phosphate
  modified_base 17: mod_base = OTHER; note = 2'-O-methyluridine-3'-phosphate
  modified_base 18: mod_base = OTHER; note = 2'-O-methyluridine-3'-phosphate
  modified_base 19: mod_base = OTHER; note = 2'-O-methyluridine-3'-phosphate
  modified_base 20: mod_base = OTHER; note = 2'-O-methylguanosine-3'-phosphate
  modified_base 21: mod_base = OTHER; note = 2'-O-methyladenosine-3'-phosphate ((2S,4R)-1-[29-[[2-(acetylamino)-2-deoxy-beta-D-galactopyra nosyl]oxy]-14,14-bis[[3-[[3-[[5-[[2-(acetylamino)-2-deoxy-b eta-D-galactopyranosyl]oxy]-1-oxopentyl]amino]propyl]amino] -3-oxopropoxy]methyl]-1,12,19,25-tetraoxo-16-oxa-13,20,24-t riazanonacos-1-yl]-4-hydroxy-2-pyrrolidinyl)methyl ester
tgctccagaactcatctttga

SEQ ID NO: 117 - RNA, 21 nt, synthetic construct
  source 1..21: mol_type = other RNA
  modified_base 1: mod_base = OTHER; note = 2'-O-methylguanosine-3'-phosphorothioate
  modified_base 2: mod_base = OTHER; note = 2'-O-methylcytidine-3'-phosphorothioate
  modified_base 3: mod_base = OTHER; note = 2'-O-methyluridine-3'-phosphate
  modified_base 4: mod_base = OTHER; note = 2'-O-methylcytidine-3'-phosphate
  modified_base 5: mod_base = OTHER; note = 2'-O-methylcytidine-3'-phosphate
  modified_base 6: mod_base = OTHER; note = 2'-O-hexadecyl-adenosine-3'-phosphate
  modified_base 7: mod_base = OTHER; note = 2'-deoxy-2'-fluoroguanosine-3'-phosphate
  modified_base 8: mod_base = OTHER; note = 2'-O-methyladenosine-3'-phosphate
  modified_base 9: mod_base = OTHER; note = 2'-deoxy-2'-fluoroadenosine-3'-phosphate
  modified_base 10: mod_base = OTHER; note = 2'-deoxy-2'-fluorocytidine-3'-phosphate
  modified_base 11: mod_base = OTHER; note = 2'-deoxy-2'-fluorouridine-3'-phosphate
  modified_base 12: mod_base = OTHER; note = 2'-O-methylcytidine-3'-phosphate
  modified_base 13: mod_base = OTHER; note = 2'-O-methyladenosine-3'-phosphate
  modified_base 14: mod_base = OTHER; note = 2'-O-methyluridine-3'-phosphate
  modified_base 15: mod_base = OTHER; note = 2'-O-methylcytidine-3'-phosphate
  modified_base 16: mod_base = OTHER; note = 2'-O-methyluridine-3'-phosphate
  modified_base 17: mod_base = OTHER; note = 2'-O-methyluridine-3'-phosphate
  modified_base 18: mod_base = OTHER; note = 2'-O-methyluridine-3'-phosphate
  modified_base 19: mod_base = OTHER; note = 2'-O-methylguanosine-3'-phosphate
  modified_base 20: mod_base = OTHER; note = 2'-O-methylguanosine-3'-phosphate
  modified_base 21: mod_base = OTHER; note = 2'-O-methyladenosine-3'-phosphate ((2S,4R)-1-[29-[[2-(acetylamino)-2-deoxy-beta-D-galactopyra nosyl]oxy]-14,14-bis[[3-[[3-[[5-[[2-(acetylamino)-2-deoxy-b eta-D-galactopyranosyl]oxy]-1-oxopentyl]amino]propyl]amino] -3-oxopropoxy]methyl]-1,12,19,25-tetraoxo-16-oxa-13,20,24-t riazanonacos-1-yl]-4-hydroxy-2-pyrrolidinyl)methyl ester
gctccagaactcatctttgga

SEQ ID NO: 118 - RNA, 21 nt, synthetic construct
  source 1..21: mol_type = other RNA
  modified_base 1: mod_base = OTHER; note = 2'-O-methylcytidine-3'-phosphorothioate
  modified_base 2: mod_base = OTHER; note = 2'-O-methyluridine-3'-phosphorothioate
  modified_base 3: mod_base = OTHER; note = 2'-O-methylcytidine-3'-phosphate
  modified_base 4: mod_base = OTHER; note = 2'-O-methylcytidine-3'-phosphate
  modified_base 5: mod_base = OTHER; note = 2'-O-methyladenosine-3'-phosphate
  modified_base 6: mod_base = OTHER; note = 2'-O-hexadecyl-guanosine-3'-phosphate
  modified_base 7: mod_base = OTHER; note = 2'-deoxy-2'-fluoroadenosine-3'-phosphate
  modified_base 8: mod_base = OTHER; note = 2'-O-methyladenosine-3'-phosphate
  modified_base 9: mod_base = OTHER; note = 2'-deoxy-2'-fluorocytidine-3'-phosphate
  modified_base 10: mod_base = OTHER; note = 2'-deoxy-2'-fluorouridine-3'-phosphate
  modified_base 11: mod_base = OTHER; note = 2'-deoxy-2'-fluorocytidine-3'-phosphate
  modified_base 12: mod_base = OTHER; note = 2'-O-methyladenosine-3'-phosphate
  modified_base 13: mod_base = OTHER; note = 2'-O-methyluridine-3'-phosphate
  modified_base 14: mod_base = OTHER; note = 2'-O-methylcytidine-3'-phosphate
  modified_base 15: mod_base = OTHER; note = 2'-O-methyluridine-3'-phosphate
  modified_base 16: mod_base = OTHER; note = 2'-O-methyluridine-3'-phosphate
  modified_base 17: mod_base = OTHER; note = 2'-O-methyluridine-3'-phosphate
  modified_base 18: mod_base = OTHER; note = 2'-O-methylguanosine-3'-phosphate
  modified_base 19: mod_base = OTHER; note = 2'-O-methylguanosine-3'-phosphate
  modified_base 20: mod_base = OTHER; note = 2'-O-methyladenosine-3'-phosphate
  modified_base 21: mod_base = OTHER; note = 2'-O-methyladenosine-3'-phosphate ((2S,4R)-1-[29-[[2-(acetylamino)-2-deoxy-beta-D-galactopyra nosyl]oxy]-14,14-bis[[3-[[3-[[5-[[2-(acetylamino)-2-deoxy-b eta-D-galactopyranosyl]oxy]-1-oxopentyl]amino]propyl]amino] -3-oxopropoxy]methyl]-1,12,19,25-tetraoxo-16-oxa-13,20,24-t riazanonacos-1-yl]-4-hydroxy-2-pyrrolidinyl)methyl ester
ctccagaactcatctttggaa

SEQ ID NO: 119 - RNA, 21 nt, synthetic construct
  source 1..21: mol_type = other RNA
  modified_base 1: mod_base = OTHER; note = 2'-O-methyluridine-3'-phosphorothioate
  modified_base 2: mod_base = OTHER; note = 2'-O-methylcytidine-3'-phosphorothioate
  modified_base 3: mod_base = OTHER; note = 2'-O-methylcytidine-3'-phosphate
  modified_base 4: mod_base = OTHER; note = 2'-O-methyladenosine-3'-phosphate
  modified_base 5: mod_base = OTHER; note = 2'-O-methylguanosine-3'-phosphate
  modified_base 6: mod_base = OTHER; note = 2'-O-hexadecyl-adenosine-3'-phosphate
  modified_base 7: mod_base = OTHER; note = 2'-deoxy-2'-fluoroadenosine-3'-phosphate
  modified_base 8: mod_base = OTHER; note = 2'-O-methylcytidine-3'-phosphate
  modified_base 9: mod_base = OTHER; note = 2'-deoxy-2'-fluorouridine-3'-phosphate
  modified_base 10: mod_base = OTHER; note = 2'-deoxy-2'-fluorocytidine-3'-phosphate
  modified_base 11: mod_base = OTHER; note = 2'-deoxy-2'-fluoroadenosine-3'-phosphate
  modified_base 12: mod_base = OTHER; note = 2'-O-methyluridine-3'-phosphate
  modified_base 13: mod_base = OTHER; note = 2'-O-methylcytidine-3'-phosphate
  modified_base 14: mod_base = OTHER; note = 2'-O-methyluridine-3'-phosphate
  modified_base 15: mod_base = OTHER; note = 2'-O-methyluridine-3'-phosphate
  modified_base 16: mod_base = OTHER; note = 2'-O-methyluridine-3'-phosphate
  modified_base 17: mod_base = OTHER; note = 2'-O-methylguanosine-3'-phosphate
  modified_base 18: mod_base = OTHER; note = 2'-O-methylguanosine-3'-phosphate
  modified_base 19: mod_base = OTHER; note = 2'-O-methyladenosine-3'-phosphate
  modified_base 20: mod_base = OTHER; note = 2'-O-methylguanosine-3'-phosphate
  modified_base 21: mod_base = OTHER; note = 2'-O-methyladenosine-3'-phosphate ((2S,4R)-1-[29-[[2-(acetylamino)-2-deoxy-beta-D-galactopyra nosyl]oxy]-14,14-bis[[3-[[3-[[5-[[2-(acetylamino)-2-deoxy-b eta-D-galactopyranosyl]oxy]-1-oxopentyl]amino]propyl]amino] -3-oxopropoxy]methyl]-1,12,19,25-tetraoxo-16-oxa-13,20,24-t riazanonacos-1-yl]-4-hydroxy-2-pyrrolidinyl)methyl ester
tccagaactcatctttggaga

SEQ ID NO: 120 - RNA, 21 nt, synthetic construct
  source 1..21: mol_type = other RNA
  modified_base 1: mod_base = OTHER; note = 2'-O-methylcytidine-3'-phosphorothioate
  modified_base 2: mod_base = OTHER; note = 2'-O-methylcytidine-3'-phosphorothioate
  modified_base 3: mod_base = OTHER; note = 2'-O-methyladenosine-3'-phosphate
  modified_base 4: mod_base = OTHER; note = 2'-O-methylguanosine-3'-phosphate
  modified_base 5: mod_base = OTHER; note = 2'-O-methyladenosine-3'-phosphate
  modified_base 6: mod_base = OTHER; note = 2'-O-hexadecyl-adenosine-3'-phosphate
  modified_base 7: mod_base = OTHER; note = 2'-deoxy-2'-fluorocytidine-3'-phosphate
  modified_base 8: mod_base = OTHER; note = 2'-O-methyluridine-3'-phosphate
  modified_base 9: mod_base = OTHER; note = 2'-deoxy-2'-fluorocytidine-3'-phosphate
  modified_base 10: mod_base = OTHER; note = 2'-deoxy-2'-fluoroadenosine-3'-phosphate
  modified_base 11: mod_base = OTHER; note = 2'-deoxy-2'-fluorouridine-3'-phosphate
  modified_base 12: mod_base = OTHER; note = 2'-O-methylcytidine-3'-phosphate
  modified_base 13: mod_base = OTHER; note = 2'-O-methyluridine-3'-phosphate
  modified_base 14: mod_base = OTHER; note = 2'-O-methyluridine-3'-phosphate
  modified_base 15: mod_base = OTHER; note = 2'-O-methyluridine-3'-phosphate
  modified_base 16: mod_base = OTHER; note = 2'-O-methylguanosine-3'-phosphate
  modified_base 17: mod_base = OTHER; note = 2'-O-methylguanosine-3'-phosphate
  modified_base 18: mod_base = OTHER; note = 2'-O-methyladenosine-3'-phosphate
  modified_base 19: mod_base = OTHER; note = 2'-O-methylguanosine-3'-phosphate
  modified_base 20: mod_base = OTHER; note = 2'-O-methylcytidine-3'-phosphate
  modified_base 21: mod_base = OTHER; note = 2'-O-methyladenosine-3'-phosphate ((2S,4R)-1-[29-[[2-(acetylamino)-2-deoxy-beta-D-galactopyra nosyl]oxy]-14,14-bis[[3-[[3-[[5-[[2-(acetylamino)-2-deoxy-b eta-D-galactopyranosyl]oxy]-1-oxopentyl]amino]propyl]amino] -3-oxopropoxy]methyl]-1,12,19,25-tetraoxo-16-oxa-13,20,24-t riazanonacos-1-yl]-4-hydroxy-2-pyrrolidinyl)methyl ester
ccagaactcatctttggagca

SEQ ID NO: 121 - RNA, 21 nt, synthetic construct
  source 1..21: mol_type = other RNA
  modified_base 1: mod_base = OTHER; note = 2'-O-methylguanosine-3'-phosphorothioate
  modified_base 2: mod_base = OTHER; note = 2'-O-methyladenosine-3'-phosphorothioate
  modified_base 3: mod_base = OTHER; note = 2'-O-methylguanosine-3'-phosphate
  modified_base 4: mod_base = OTHER; note = 2'-O-methyladenosine-3'-phosphate
  modified_base 5: mod_base = OTHER; note = 2'-O-methylguanosine-3'-phosphate
  modified_base 6: mod_base = OTHER; note = 2'-O-hexadecyl-adenosine-3'-phosphate
  modified_base 7: mod_base = OTHER; note = 2'-deoxy-2'-fluorouridine-3'-phosphate
  modified_base 8: mod_base = OTHER; note = 2'-O-methylguanosine-3'-phosphate
  modified_base 9: mod_base = OTHER; note = 2'-deoxy-2'-fluoroadenosine-3'-phosphate
  modified_base 10: mod_base = OTHER; note = 2'-deoxy-2'-fluoroadenosine-3'-phosphate
  modified_base 11: mod_base = OTHER; note = 2'-deoxy-2'-fluorocytidine-3'-phosphate
  modified_base 12: mod_base = OTHER; note = 2'-O-methylcytidine-3'-phosphate
  modified_base 13: mod_base = OTHER; note = 2'-O-methylcytidine-3'-phosphate
  modified_base 14: mod_base = OTHER; note = 2'-O-methyluridine-3'-phosphate
  modified_base 15: mod_base = OTHER; note = 2'-O-methyladenosine-3'-phosphate
  modified_base 16: mod_base = OTHER; note = 2'-O-methyladenosine-3'-phosphate
  modified_base 17: mod_base = OTHER; note = 2'-O-methylcytidine-3'-phosphate
  modified_base 18: mod_base = OTHER; note = 2'-O-methyluridine-3'-phosphate
  modified_base 19: mod_base = OTHER; note = 2'-O-methyladenosine-3'-phosphate
  modified_base 20: mod_base = OTHER; note = 2'-O-methyluridine-3'-phosphate
  modified_base 21: mod_base = OTHER; note = 2'-O-methyladenosine-3'-phosphate ((2S,4R)-1-[29-[[2-(acetylamino)-2-deoxy-beta-D-galactopyra nosyl]oxy]-14,14-bis[[3-[[3-[[5-[[2-(acetylamino)-2-deoxy-b eta-D-galactopyranosyl]oxy]-1-oxopentyl]amino]propyl]amino] -3-oxopropoxy]methyl]-1,12,19,25-tetraoxo-16-oxa-13,20,24-t riazanonacos-1-yl]-4-hydroxy-2-pyrrolidinyl)methyl ester
gagagatgaaccctaactata

SEQ ID NO: 122 - RNA, 21 nt, synthetic construct
  source 1..21: mol_type = other RNA
  modified_base 1: mod_base = OTHER; note = 2'-O-methylguanosine-3'-phosphorothioate
  modified_base 2: mod_base = OTHER; note = 2'-O-methyladenosine-3'-phosphorothioate
  modified_base 3: mod_base = OTHER; note = 2'-O-methylcytidine-3'-phosphate
  modified_base 4: mod_base = OTHER; note = 2'-O-methyladenosine-3'-phosphate
  modified_base 5: mod_base = OTHER; note = 2'-O-methyladenosine-3'-phosphate
  modified_base 6: mod_base = OTHER; note = 2'-O-hexadecyl-adenosine-3'-phosphate
  modified_base 7: mod_base = OTHER; note = 2'-deoxy-2'-fluoroguanosine-3'-phosphate
  modified_base 8: mod_base = OTHER; note = 2'-O-methylguanosine-3'-phosphate
  modified_base 9: mod_base = OTHER; note = 2'-deoxy-2'-fluorouridine-3'-phosphate
  modified_base 10: mod_base = OTHER; note = 2'-deoxy-2'-fluoroguanosine-3'-phosphate
  modified_base 11: mod_base = OTHER; note = 2'-deoxy-2'-fluorouridine-3'-phosphate
  modified_base 12: mod_base = OTHER; note = 2'-O-methyluridine-3'-phosphate
  modified_base 13: mod_base = OTHER; note = 2'-O-methylcytidine-3'-phosphate
  modified_base 14: mod_base = OTHER; note = 2'-O-methyladenosine-3'-phosphate
  modified_base 15: mod_base = OTHER; note = 2'-O-methyladenosine-3'-phosphate
  modified_base 16: mod_base = OTHER; note = 2'-O-methyladenosine-3'-phosphate
  modified_base 17: mod_base = OTHER; note = 2'-O-methyluridine-3'-phosphate
  modified_base 18: mod_base = OTHER; note = 2'-O-methylcytidine-3'-phosphate
  modified_base 19: mod_base = OTHER; note = 2'-O-methyluridine-3'-phosphate
  modified_base 20: mod_base = OTHER; note = 2'-O-methyluridine-3'-phosphate
  modified_base 21: mod_base = OTHER; note = 2'-O-methyladenosine-3'-phosphate ((2S,4R)-1-[29-[[2-(acetylamino)-2-deoxy-beta-D-galactopyra nosyl]oxy]-14,14-bis[[3-[[3-[[5-[[2-(acetylamino)-2-deoxy-b eta-D-galactopyranosyl]oxy]-1-oxopentyl]amino]propyl]amino] -3-oxopropoxy]methyl]-1,12,19,25-tetraoxo-16-oxa-13,20,24-t riazanonacos-1-yl]-4-hydroxy-2-pyrrolidinyl)methyl ester
gacaaaggtgttcaaatctta

SEQ ID NO: 123 - RNA, 21 nt, synthetic construct
  source 1..21: mol_type = other RNA
  modified_base 1: mod_base = OTHER; note = 2'-O-methylguanosine-3'-phosphorothioate
  modified_base 2: mod_base = OTHER; note = 2'-O-methylcytidine-3'-phosphorothioate
  modified_base 3: mod_base = OTHER; note = 2'-O-methylcytidine-3'-phosphate
  modified_base 4: mod_base = OTHER; note = 2'-O-methylcytidine-3'-phosphate
  modified_base 5: mod_base = OTHER; note = 2'-O-methyladenosine-3'-phosphate
  modified_base 6: mod_base = OTHER; note = 2'-O-hexadecyl-cytidine-3'-phosphate
  modified_base 7: mod_base = OTHER; note = 2'-deoxy-2'-fluoroadenosine-3'-phosphate
  modified_base 8: mod_base = OTHER; note = 2'-O-methylguanosine-3'-phosphate
  modified_base 9: mod_base = OTHER; note = 2'-deoxy-2'-fluorocytidine-3'-phosphate
  modified_base 10: mod_base = OTHER; note = 2'-deoxy-2'-fluorouridine-3'-phosphate
  modified_base 11: mod_base = OTHER; note = 2'-deoxy-2'-fluorouridine-3'-phosphate
  modified_base 12: mod_base = OTHER; note = 2'-O-methylcytidine-3'-phosphate
  modified_base 13: mod_base = OTHER; note = 2'-O-methyluridine-3'-phosphate
  modified_base 14: mod_base = OTHER; note = 2'-O-methyluridine-3'-phosphate
  modified_base 15: mod_base = OTHER; note = 2'-O-methylcytidine-3'-phosphate
  modified_base 16: mod_base = OTHER; note = 2'-O-methylguanosine-3'-phosphate
  modified_base 17: mod_base = OTHER; note = 2'-O-methyladenosine-3'-phosphate
  modified_base 18: mod_base = OTHER; note = 2'-O-methyluridine-3'-phosphate
  modified_base 19: mod_base = OTHER; note = 2'-O-methylguanosine-3'-phosphate
  modified_base 20: mod_base = OTHER; note = 2'-O-methyladenosine-3'-phosphate
  modified_base 21: mod_base = OTHER; note = 2'-O-methyladenosine-3'-phosphate ((2S,4R)-1-[29-[[2-(acetylamino)-2-deoxy-beta-D-galactopyra nosyl]oxy]-14,14-bis[[3-[[3-[[5-[[2-(acetylamino)-2-deoxy-b eta-D-galactopyranosyl]oxy]-1-oxopentyl]amino]propyl]amino] -3-oxopropoxy]methyl]-1,12,19,25-tetraoxo-16-oxa-13,20,24-t riazanonacos-1-yl]-4-hydroxy-2-pyrrolidinyl)methyl ester
gcccacagcttcttcgatgaa

SEQ ID NO: 124 - RNA, 21 nt, synthetic construct
  source 1..21: mol_type = other RNA
  modified_base 1: mod_base = OTHER; note = 2'-O-methyladenosine-3'-phosphorothioate
  modified_base 2: mod_base = OTHER; note = 2'-O-methylguanosine-3'-phosphorothioate
  modified_base 3: mod_base = OTHER; note = 2'-O-methylcytidine-3'-phosphate
  modified_base 4: mod_base = OTHER; note = 2'-O-methyluridine-3'-phosphate
  modified_base 5: mod_base = OTHER; note = 2'-O-methyluridine-3'-phosphate
  modified_base 6: mod_base = OTHER; note = 2'-O-hexadecyl-cytidine-3'-phosphate
  modified_base 7: mod_base = OTHER; note = 2'-deoxy-2'-fluorouridine-3'-phosphate
  modified_base 8: mod_base = OTHER; note = 2'-O-methyluridine-3'-phosphate
  modified_base 9: mod_base = OTHER; note = 2'-deoxy-2'-fluorocytidine-3'-phosphate
  modified_base 10: mod_base = OTHER; note = 2'-deoxy-2'-fluoroguanosine-3'-phosphate
  modified_base 11: mod_base = OTHER; note = 2'-deoxy-2'-fluoroadenosine-3'-phosphate
  modified_base 12: mod_base = OTHER; note = 2'-O-methyluridine-3'-phosphate
  modified_base 13: mod_base = OTHER; note = 2'-O-methylguanosine-3'-phosphate
  modified_base 14: mod_base = OTHER; note = 2'-O-methyladenosine-3'-phosphate
  modified_base 15: mod_base = OTHER; note = 2'-O-methyladenosine-3'-phosphate
  modified_base 16: mod_base = OTHER; note = 2'-O-methylcytidine-3'-phosphate
  modified_base 17: mod_base = OTHER; note = 2'-O-methyluridine-3'-phosphate
  modified_base 18: mod_base = OTHER; note = 2'-O-methylguanosine-3'-phosphate
  modified_base 19: mod_base = OTHER; note = 2'-O-methylcytidine-3'-phosphate
  modified_base 20: mod_base = OTHER; note = 2'-O-methylguanosine-3'-phosphate
  modified_base 21: mod_base = OTHER; note = 2'-O-methyladenosine-3'-phosphate ((2S,4R)-1-[29-[[2-(acetylamino)-2-deoxy-beta-D-galactopyra nosyl]oxy]-14,14-bis[[3-[[3-[[5-[[2-(acetylamino)-2-deoxy-b eta-D-galactopyranosyl]oxy]-1-oxopentyl]amino]propyl]amino] -3-oxopropoxy]methyl]-1,12,19,25-tetraoxo-16-oxa-13,20,24-t riazanonacos-1-yl]-4-hydroxy-2-pyrrolidinyl)methyl ester
agcttcttcgatgaactgcga

SEQ ID NO: 125 - RNA, 21 nt, synthetic construct
  source 1..21: mol_type = other RNA
  modified_base 1: mod_base = OTHER; note = 2'-O-methylcytidine-3'-phosphorothioate
  modified_base 2: mod_base = OTHER; note = 2'-O-methylcytidine-3'-phosphorothioate
  modified_base 3: mod_base = OTHER; note = 2'-O-methyladenosine-3'-phosphate
  modified_base 4: mod_base = OTHER; note = 2'-O-methyluridine-3'-phosphate
  modified_base 5: mod_base = OTHER; note = 2'-O-methylcytidine-3'-phosphate
  modified_base 6: mod_base = OTHER; note = 2'-O-hexadecyl-cytidine-3'-phosphate
  modified_base 7: mod_base = OTHER; note = 2'-deoxy-2'-fluorouridine-3'-phosphate
  modified_base 8: mod_base = OTHER; note = 2'-O-methylcytidine-3'-phosphate
  modified_base 9: mod_base = OTHER; note = 2'-deoxy-2'-fluoroadenosine-3'-phosphate
  modified_base 10: mod_base = OTHER; note = 2'-deoxy-2'-fluorocytidine-3'-phosphate
  modified_base 11: mod_base = OTHER; note = 2'-deoxy-2'-fluoroadenosine-3'-phosphate
  modified_base 12: mod_base = OTHER; note = 2'-O-methyladenosine-3'-phosphate
  modified_base 13: mod_base = OTHER; note = 2'-O-methylguanosine-3'-phosphate
  modified_base 14: mod_base = OTHER; note = 2'-O-methylcytidine-3'-phosphate
  modified_base 15: mod_base = OTHER; note = 2'-O-methyluridine-3'-phosphate
  modified_base 16: mod_base = OTHER; note = 2'-O-methyluridine-3'-phosphate
  modified_base 17: mod_base = OTHER; note = 2'-O-methyluridine-3'-phosphate
  modified_base 18: mod_base = OTHER; note = 2'-O-methyladenosine-3'-phosphate
  modified_base 19: mod_base = OTHER; note = 2'-O-methyladenosine-3'-phosphate
  modified_base 20: mod_base = OTHER; note = 2'-O-methylcytidine-3'-phosphate
  modified_base 21: mod_base = OTHER; note = 2'-O-methyladenosine-3'-phosphate ((2S,4R)-1-[29-[[2-(acetylamino)-2-deoxy-beta-D-galactopyra nosyl]oxy]-14,14-bis[[3-[[3-[[5-[[2-(acetylamino)-2-deoxy-b eta-D-galactopyranosyl]oxy]-1-oxopentyl]amino]propyl]amino] -3-oxopropoxy]methyl]-1,12,19,25-tetraoxo-16-oxa-13,20,24-t riazanonacos-1-yl]-4-hydroxy-2-pyrrolidinyl)methyl ester
ccatcctcacaagctttaaca

SEQ ID NO: 126 - RNA, 21 nt, synthetic construct
  source 1..21: mol_type = other RNA
  modified_base 1: mod_base = OTHER; note = 2'-O-methylcytidine-3'-phosphorothioate
  modified_base 2: mod_base = OTHER; note = 2'-O-methyladenosine-3'-phosphorothioate
  modified_base 3: mod_base = OTHER; note = 2'-O-methyluridine-3'-phosphate
  modified_base 4: mod_base = OTHER; note = 2'-O-methylcytidine-3'-phosphate
  modified_base 5: mod_base = OTHER; note = 2'-O-methylcytidine-3'-phosphate
  modified_base 6: mod_base = OTHER; note = 2'-O-hexadecyl-uridine-3'-phosphate
  modified_base 7: mod_base = OTHER; note = 2'-deoxy-2'-fluorocytidine-3'-phosphate
  modified_base 8: mod_base = OTHER; note = 2'-O-methyladenosine-3'-phosphate
  modified_base 9: mod_base = OTHER; note = 2'-deoxy-2'-fluorocytidine-3'-phosphate
  modified_base 10: mod_base = OTHER; note = 2'-deoxy-2'-fluoroadenosine-3'-phosphate
  modified_base 11: mod_base = OTHER; note = 2'-deoxy-2'-fluoroadenosine-3'-phosphate
  modified_base 12: mod_base = OTHER; note = 2'-O-methylguanosine-3'-phosphate
  modified_base 13: mod_base = OTHER; note = 2'-O-methylcytidine-3'-phosphate
  modified_base 14: mod_base = OTHER; note = 2'-O-methyluridine-3'-phosphate
  modified_base 15: mod_base = OTHER; note = 2'-O-methyluridine-3'-phosphate
  modified_base 16: mod_base = OTHER; note = 2'-O-methyluridine-3'-phosphate
  modified_base 17: mod_base = OTHER; note = 2'-O-methyladenosine-3'-phosphate
  modified_base 18: mod_base = OTHER; note = 2'-O-methyladenosine-3'-phosphate
  modified_base 19: mod_base = OTHER; note = 2'-O-methylcytidine-3'-phosphate
  modified_base 20: mod_base = OTHER; note = 2'-O-methyluridine-3'-phosphate
  modified_base 21: mod_base = OTHER; note = 2'-O-methyladenosine-3'-phosphate ((2S,4R)-1-[29-[[2-(acetylamino)-2-deoxy-beta-D-galactopyra nosyl]oxy]-14,14-bis[[3-[[3-[[5-[[2-(acetylamino)-2-deoxy-b eta-D-galactopyranosyl]oxy]-1-oxopentyl]amino]propyl]amino] -3-oxopropoxy]methyl]-1,12,19,25-tetraoxo-16-oxa-13,20,24-t riazanonacos-1-yl]-4-hydroxy-2-pyrrolidinyl)methyl ester
catcctcacaagctttaacta

SEQ ID NO: 127 - RNA, 21 nt, synthetic construct
  source 1..21: mol_type = other RNA
  modified_base 1: mod_base = OTHER; note = 2'-O-methyladenosine-3'-phosphorothioate
  modified_base 2: mod_base = OTHER; note = 2'-O-methyluridine-3'-phosphorothioate
  modified_base 3: mod_base = OTHER; note = 2'-O-methylcytidine-3'-phosphate
  modified_base 4: mod_base = OTHER; note = 2'-O-methylcytidine-3'-phosphate
  modified_base 5: mod_base = OTHER; note = 2'-O-methyluridine-3'-phosphate
  modified_base 6: mod_base = OTHER; note = 2'-O-hexadecyl-cytidine-3'-phosphate
  modified_base 7: mod_base = OTHER; note = 2'-deoxy-2'-fluoroadenosine-3'-phosphate
  modified_base 8: mod_base = OTHER; note = 2'-O-methylcytidine-3'-phosphate
  modified_base 9: mod_base = OTHER; note = 2'-deoxy-2'-fluoroadenosine-3'-phosphate
  modified_base 10: mod_base = OTHER; note = 2'-deoxy-2'-fluoroadenosine-3'-phosphate
  modified_base 11: mod_base = OTHER; note = 2'-deoxy-2'-fluoroguanosine-3'-phosphate
  modified_base 12: mod_base = OTHER; note = 2'-O-methylcytidine-3'-phosphate
  modified_base 13: mod_base = OTHER; note = 2'-O-methyluridine-3'-phosphate
  modified_base 14: mod_base = OTHER; note = 2'-O-methyluridine-3'-phosphate
  modified_base 15: mod_base = OTHER; note = 2'-O-methyluridine-3'-phosphate
  modified_base 16: mod_base = OTHER; note = 2'-O-methyladenosine-3'-phosphate
  modified_base 17: mod_base = OTHER; note = 2'-O-methyladenosine-3'-phosphate
  modified_base 18: mod_base = OTHER; note = 2'-O-methylcytidine-3'-phosphate
  modified_base 19: mod_base = OTHER; note = 2'-O-methyluridine-3'-phosphate
  modified_base 20: mod_base = OTHER; note = 2'-O-methylguanosine-3'-phosphate
  modified_base 21: mod_base = OTHER; note = 2'-O-methyladenosine-3'-phosphate ((2S,4R)-1-[29-[[2-(acetylamino)-2-deoxy-beta-D-galactopyra nosyl]oxy]-14,14-bis[[3-[[3-[[5-[[2-(acetylamino)-2-deoxy-b eta-D-galactopyranosyl]oxy]-1-oxopentyl]amino]propyl]amino] -3-oxopropoxy]methyl]-1,12,19,25-tetraoxo-16-oxa-13,20,24-t riazanonacos-1-yl]-4-hydroxy-2-pyrrolidinyl)methyl ester
atcctcacaagctttaactga

SEQ ID NO: 128 - RNA, 21 nt, synthetic construct
  source 1..21: mol_type = other RNA
  modified_base 1: mod_base = OTHER; note = 2'-O-methyladenosine-3'-phosphorothioate
  modified_base 2: mod_base = OTHER; note = 2'-O-methyladenosine-3'-phosphorothioate
  modified_base 3: mod_base = OTHER; note = 2'-O-methylguanosine-3'-phosphate
  modified_base 4: mod_base = OTHER; note = 2'-O-methyladenosine-3'-phosphate
  modified_base 5: mod_base = OTHER; note = 2'-O-methylguanosine-3'-phosphate
  modified_base 6: mod_base = OTHER; note = 2'-O-hexadecyl-guanosine-3'-phosphate
  modified_base 7: mod_base = OTHER; note = 2'-deoxy-2'-fluoroadenosine-3'-phosphate
  modified_base 8: mod_base = OTHER; note = 2'-O-methyluridine-3'-phosphate
  modified_base 9: mod_base = OTHER; note = 2'-deoxy-2'-fluorouridine-3'-phosphate
  modified_base 10: mod_base = OTHER; note = 2'-deoxy-2'-fluorouridine-3'-phosphate
  modified_base 11: mod_base = OTHER; note = 2'-deoxy-2'-fluorouridine-3'-phosphate
  modified_base 12: mod_base = OTHER; note = 2'-O-methyladenosine-3'-phosphate
  modified_base 13: mod_base = OTHER; note = 2'-O-methyladenosine-3'-phosphate
  modified_base 14: mod_base = OTHER; note = 2'-O-methylcytidine-3'-phosphate
  modified_base 15: mod_base = OTHER; note = 2'-O-methyluridine-3'-phosphate
  modified_base 16: mod_base = OTHER; note = 2'-O-methylguanosine-3'-phosphate
  modified_base 17: mod_base = OTHER; note = 2'-O-methyluridine-3'-phosphate
  modified_base 18: mod_base = OTHER; note = 2'-O-methyluridine-3'-phosphate
  modified_base 19: mod_base = OTHER; note = 2'-O-methyluridine-3'-phosphate
  modified_base 20: mod_base = OTHER; note = 2'-O-methylguanosine-3'-phosphate
  modified_base 21: mod_base = OTHER; note = 2'-O-methyladenosine-3'-phosphate ((2S,4R)-1-[29-[[2-(acetylamino)-2-deoxy-beta-D-galactopyra nosyl]oxy]-14,14-bis[[3-[[3-[[5-[[2-(acetylamino)-2-deoxy-b eta-D-galactopyranosyl]oxy]-1-oxopentyl]amino]propyl]amino] -3-oxopropoxy]methyl]-1,12,19,25-tetraoxo-16-oxa-13,20,24-t riazanonacos-1-yl]-4-hydroxy-2-pyrrolidinyl)methyl ester
aagaggattttaactgtttga

SEQ ID NO: 129 - RNA, 21 nt, synthetic construct
  source 1..21: mol_type = other RNA
  modified_base 1: mod_base = OTHER; note = 2'-O-methyladenosine-3'-phosphorothioate
  modified_base 2: mod_base = OTHER; note = 2'-O-methylguanosine-3'-phosphorothioate
  modified_base 3: mod_base = OTHER; note = 2'-O-methyladenosine-3'-phosphate
  modified_base 4: mod_base = OTHER; note = 2'-O-methylguanosine-3'-phosphate
  modified_base 5: mod_base = OTHER; note = 2'-O-methylguanosine-3'-phosphate
  modified_base 6: mod_base = OTHER; note = 2'-O-hexadecyl-adenosine-3'-phosphate
  modified_base 7: mod_base = OTHER; note = 2'-deoxy-2'-fluorouridine-3'-phosphate
  modified_base 8: mod_base = OTHER; note = 2'-O-methyluridine-3'-phosphate
  modified_base 9: mod_base = OTHER; note = 2'-deoxy-2'-fluorouridine-3'-phosphate
  modified_base 10: mod_base = OTHER; note = 2'-deoxy-2'-fluorouridine-3'-phosphate
  modified_base 11: mod_base = OTHER; note = 2'-deoxy-2'-fluoroadenosine-3'-phosphate
  modified_base 12: mod_base = OTHER; note = 2'-O-methyladenosine-3'-phosphate
  modified_base 13: mod_base = OTHER; note = 2'-O-methylcytidine-3'-phosphate
  modified_base 14: mod_base = OTHER; note = 2'-O-methyluridine-3'-phosphate
  modified_base 15: mod_base = OTHER; note = 2'-O-methylguanosine-3'-phosphate
  modified_base 16: mod_base = OTHER; note = 2'-O-methyluridine-3'-phosphate
  modified_base 17: mod_base = OTHER; note = 2'-O-methyluridine-3'-phosphate
  modified_base 18: mod_base = OTHER; note = 2'-O-methyluridine-3'-phosphate
  modified_base 19: mod_base = OTHER; note = 2'-O-methylguanosine-3'-phosphate
  modified_base 20: mod_base = OTHER; note = 2'-O-methyluridine-3'-phosphate
  modified_base 21: mod_base = OTHER; note = 2'-O-methyladenosine-3'-phosphate ((2S,4R)-1-[29-[[2-(acetylamino)-2-deoxy-beta-D-galactopyra nosyl]oxy]-14,14-bis[[3-[[3-[[5-[[2-(acetylamino)-2-deoxy-b eta-D-galactopyranosyl]oxy]-1-oxopentyl]amino]propyl]amino] -3-oxopropoxy]methyl]-1,12,19,25-tetraoxo-16-oxa-13,20,24-t riazanonacos-1-yl]-4-hydroxy-2-pyrrolidinyl)methyl ester
agaggattttaactgtttgta

SEQ ID NO: 130 - RNA, 21 nt, synthetic construct
  source 1..21: mol_type = other RNA
  modified_base 1: mod_base = OTHER; note = 2'-O-methylguanosine-3'-phosphorothioate
  modified_base 2: mod_base = OTHER; note = 2'-O-methyladenosine-3'-phosphorothioate
  modified_base 3: mod_base = OTHER; note = 2'-O-methylguanosine-3'-phosphate
  modified_base 4: mod_base = OTHER; note = 2'-O-methylguanosine-3'-phosphate
  modified_base 5: mod_base = OTHER; note = 2'-O-methyladenosine-3'-phosphate
  modified_base 6: mod_base = OTHER; note = 2'-O-hexadecyl-uridine-3'-phosphate
  modified_base 7: mod_base = OTHER; note = 2'-deoxy-2'-fluorouridine-3'-phosphate
  modified_base 8: mod_base = OTHER; note = 2'-O-methyluridine-3'-phosphate
  modified_base 9: mod_base = OTHER; note = 2'-deoxy-2'-fluorouridine-3'-phosphate
  modified_base 10: mod_base = OTHER; note = 2'-deoxy-2'-fluoroadenosine-3'-phosphate
  modified_base 11: mod_base = OTHER; note = 2'-deoxy-2'-fluoroadenosine-3'-phosphate
  modified_base 12: mod_base = OTHER; note = 2'-O-methylcytidine-3'-phosphate
  modified_base 13: mod_base = OTHER; note = 2'-O-methyluridine-3'-phosphate
  modified_base 14: mod_base = OTHER; note = 2'-O-methylguanosine-3'-phosphate
  modified_base 15: mod_base = OTHER; note = 2'-O-methyluridine-3'-phosphate
  modified_base 16: mod_base = OTHER; note = 2'-O-methyluridine-3'-phosphate
  modified_base 17: mod_base = OTHER; note = 2'-O-methyluridine-3'-phosphate
  modified_base 18: mod_base = OTHER; note = 2'-O-methylguanosine-3'-phosphate
  modified_base 19: mod_base = OTHER; note = 2'-O-methyluridine-3'-phosphate
  modified_base 20: mod_base = OTHER; note = 2'-O-methyladenosine-3'-phosphate
  modified_base 21: mod_base = OTHER; note = 2'-O-methyladenosine-3'-phosphate ((2S,4R)-1-[29-[[2-(acetylamino)-2-deoxy-beta-D-galactopyra nosyl]oxy]-14,14-bis[[3-[[3-[[5-[[2-(acetylamino)-2-deoxy-b eta-D-galactopyranosyl]oxy]-1-oxopentyl]amino]propyl]amino] -3-oxopropoxy]methyl]-1,12,19,25-tetraoxo-16-oxa-13,20,24-t riazanonacos-1-yl]-4-hydroxy-2-pyrrolidinyl)methyl ester
gaggattttaactgtttgtaa

SEQ ID NO: 131 - RNA, 21 nt, synthetic construct
  source 1..21: mol_type = other RNA
  modified_base 1: mod_base = OTHER; note = 2'-O-methyluridine-3'-phosphorothioate
  modified_base 2: mod_base = OTHER; note = 2'-O-methylguanosine-3'-phosphorothioate
  modified_base 3: mod_base = OTHER; note = 2'-O-methylguanosine-3'-phosphate
  modified_base 4: mod_base = OTHER; note = 2'-O-methylguanosine-3'-phosphate
  modified_base 5: mod_base = OTHER; note = 2'-O-methyluridine-3'-phosphate
  modified_base 6: mod_base = OTHER; note = 2'-O-hexadecyl-guanosine-3'-phosphate
  modified_base 7: mod_base = OTHER; note = 2'-deoxy-2'-fluorouridine-3'-phosphate
  modified_base 8: mod_base = OTHER; note = 2'-O-methyladenosine-3'-phosphate
  modified_base 9: mod_base = OTHER; note = 2'-deoxy-2'-fluoroadenosine-3'-phosphate
  modified_base 10: mod_base = OTHER; note = 2'-deoxy-2'-fluoroadenosine-3'-phosphate
  modified_base 11: mod_base = OTHER; note = 2'-deoxy-2'-fluorouridine-3'-phosphate
  modified_base 12: mod_base = OTHER; note = 2'-O-methyladenosine-3'-phosphate
  modified_base 13: mod_base = OTHER; note = 2'-O-methylguanosine-3'-phosphate
  modified_base 14: mod_base = OTHER; note = 2'-O-methyladenosine-3'-phosphate
  modified_base 15: mod_base = OTHER; note = 2'-O-methyluridine-3'-phosphate
  modified_base 16: mod_base = OTHER; note = 2'-O-methyluridine-3'-phosphate
  modified_base 17: mod_base = OTHER; note = 2'-O-methylguanosine-3'-phosphate
  modified_base 18: mod_base = OTHER; note = 2'-O-methyluridine-3'-phosphate
  modified_base 19: mod_base = OTHER; note = 2'-O-methyluridine-3'-phosphate
  modified_base 20: mod_base = OTHER; note = 2'-O-methyladenosine-3'-phosphate
  modified_base 21: mod_base = OTHER; note = 2'-O-methyladenosine-3'-phosphate ((2S,4R)-1-[29-[[2-(acetylamino)-2-deoxy-beta-D-galactopyra nosyl]oxy]-14,14-bis[[3-[[3-[[5-[[2-(acetylamino)-2-deoxy-b eta-D-galactopyranosyl]oxy]-1-oxopentyl]amino]propyl]amino] -3-oxopropoxy]methyl]-1,12,19,25-tetraoxo-16-oxa-13,20,24-t riazanonacos-1-yl]-4-hydroxy-2-pyrrolidinyl)methyl ester
tgggtgtaaatagattgttaa

SEQ ID NO: 132 - RNA, 21 nt, synthetic construct
  source 1..21: mol_type = other RNA
  modified_base 1: mod_base = OTHER; note = 2'-O-methylguanosine-3'-phosphorothioate
  modified_base 2: mod_base = OTHER; note = 2'-O-methylguanosine-3'-phosphorothioate
  modified_base 3: mod_base = OTHER; note = 2'-O-methylguanosine-3'-phosphate
  modified_base 4: mod_base = OTHER; note = 2'-O-methyluridine-3'-phosphate
  modified_base 5: mod_base = OTHER; note = 2'-O-methylguanosine-3'-phosphate
  modified_base 6: mod_base = OTHER; note = 2'-O-hexadecyl-uridine-3'-phosphate
  modified_base 7: mod_base = OTHER; note = 2'-deoxy-2'-fluoroadenosine-3'-phosphate
  modified_base 8: mod_base = OTHER; note = 2'-O-methyladenosine-3'-phosphate
  modified_base 9: mod_base = OTHER; note = 2'-deoxy-2'-fluoroadenosine-3'-phosphate
  modified_base 10: mod_base = OTHER; note = 2'-deoxy-2'-fluorouridine-3'-phosphate
  modified_base 11: mod_base = OTHER; note = 2'-deoxy-2'-fluoroadenosine-3'-phosphate
  modified_base 12: mod_base = OTHER; note = 2'-O-methylguanosine-3'-phosphate
  modified_base 13: mod_base = OTHER; note = 2'-O-methyladenosine-3'-phosphate
  modified_base 14: mod_base = OTHER; note = 2'-O-methyluridine-3'-phosphate
  modified_base 15: mod_base = OTHER; note = 2'-O-methyluridine-3'-phosphate
  modified_base 16: mod_base = OTHER; note = 2'-O-methylguanosine-3'-phosphate
  modified_base 17: mod_base = OTHER; note = 2'-O-methyluridine-3'-phosphate
  modified_base 18: mod_base = OTHER; note = 2'-O-methyluridine-3'-phosphate
  modified_base 19: mod_base = OTHER; note = 2'-O-methyladenosine-3'-phosphate
  modified_base 20: mod_base = OTHER; note = 2'-O-methyluridine-3'-phosphate
  modified_base 21: mod_base = OTHER; note = 2'-O-methyladenosine-3'-phosphate ((2S,4R)-1-[29-[[2-(acetylamino)-2-deoxy-beta-D-galactopyra nosyl]oxy]-14,14-bis[[3-[[3-[[5-[[2-(acetylamino)-2-deoxy-b eta-D-galactopyranosyl]oxy]-1-oxopentyl]amino]propyl]amino] -3-oxopropoxy]methyl]-1,12,19,25-tetraoxo-16-oxa-13,20,24-t riazanonacos-1-yl]-4-hydroxy-2-pyrrolidinyl)methyl ester
gggtgtaaatagattgttata

SEQ ID NO: 133 - RNA, 21 nt, synthetic construct
  source 1..21: mol_type = other RNA
  modified_base 1: mod_base = OTHER; note = 2'-O-methyladenosine-3'-phosphorothioate
  modified_base 2: mod_base = OTHER; note = 2'-O-methyladenosine-3'-phosphorothioate
  modified_base 3: mod_base = OTHER; note = 2'-O-methyluridine-3'-phosphate
  modified_base 4: mod_base = OTHER; note = 2'-O-methyluridine-3'-phosphate
  modified_base 5: mod_base = OTHER; note = 2'-O-methylcytidine-3'-phosphate
  modified_base 6: mod_base = OTHER; note = 2'-O-hexadecyl-adenosine-3'-phosphate
  modified_base 7: mod_base = OTHER; note = 2'-deoxy-2'-fluorocytidine-3'-phosphate
  modified_base 8: mod_base = OTHER; note = 2'-O-methyladenosine-3'-phosphate
  modified_base 9: mod_base = OTHER; note = 2'-deoxy-2'-fluorocytidine-3'-phosphate
  modified_base 10: mod_base = OTHER; note = 2'-deoxy-2'-fluorocytidine-3'-phosphate
  modified_base 11: mod_base = OTHER; note = 2'-deoxy-2'-fluoroadenosine-3'-phosphate
  modified_base 12: mod_base = OTHER; note = 2'-O-methyluridine-3'-phosphate
  modified_base 13: mod_base = OTHER; note = 2'-O-methyluridine-3'-phosphate
  modified_base 14: mod_base = OTHER; note = 2'-O-methylcytidine-3'-phosphate
  modified_base 15: mod_base = OTHER; note = 2'-O-methyladenosine-3'-phosphate
  modified_base 16: mod_base = OTHER; note = 2'-O-methyladenosine-3'-phosphate
  modified_base 17: mod_base = OTHER; note = 2'-O-methylcytidine-3'-phosphate
  modified_base 18: mod_base = OTHER; note = 2'-O-methyluridine-3'-phosphate
  modified_base 19: mod_base = OTHER; note = 2'-O-methyluridine-3'-phosphate
  modified_base 20: mod_base = OTHER; note = 2'-O-methylguanosine-3'-phosphate
  modified_base 21: mod_base = OTHER; note = 2'-O-methyladenosine-3'-phosphate ((2S,4R)-1-[29-[[2-(acetylamino)-2-deoxy-beta-D-galactopyra nosyl]oxy]-14,14-bis[[3-[[3-[[5-[[2-(acetylamino)-2-deoxy-b eta-D-galactopyranosyl]oxy]-1-oxopentyl]amino]propyl]amino] -3-oxopropoxy]methyl]-1,12,19,25-tetraoxo-16-oxa-13,20,24-t riazanonacos-1-yl]-4-hydroxy-2-pyrrolidinyl)methyl ester
aattcacaccattcaacttga

SEQ ID NO: 134 - RNA, 21 nt, synthetic construct
  source 1..21: mol_type = other RNA
  modified_base 1: mod_base = OTHER; note = 2'-O-methylguanosine-3'-phosphorothioate
  modified_base 2: mod_base = OTHER; note = 2'-O-methyluridine-3'-phosphorothioate
  modified_base 3: mod_base = OTHER; note = 2'-O-methylcytidine-3'-phosphate
  modified_base 4: mod_base = OTHER; note = 2'-O-methylcytidine-3'-phosphate
  modified_base 5: mod_base = OTHER; note = 2'-O-methylcytidine-3'-phosphate
  modified_base 6: mod_base = OTHER; note = 2'-O-hexadecyl-uridine-3'-phosphate
  modified_base 7: mod_base = OTHER; note = 2'-deoxy-2'-fluoroguanosine-3'-phosphate
  modified_base 8: mod_base = OTHER; note = 2'-O-methylguanosine-3'-phosphate
  modified_base 9: mod_base = OTHER; note = 2'-deoxy-2'-fluorouridine-3'-phosphate
  modified_base 10: mod_base = OTHER; note = 2'-deoxy-2'-fluoroguanosine-3'-phosphate
  modified_base 11: mod_base = OTHER; note = 2'-deoxy-2'-fluorouridine-3'-phosphate
  modified_base 12: mod_base = OTHER; note = 2'-O-methylcytidine-3'-phosphate
  modified_base 13: mod_base = OTHER; note = 2'-O-methyluridine-3'-phosphate
  modified_base 14: mod_base = OTHER; note = 2'-O-methyluridine-3'-phosphate
  modified_base 15: mod_base = OTHER; note = 2'-O-methyladenosine-3'-phosphate
  modified_base 16: mod_base = OTHER; note = 2'-O-methylguanosine-3'-phosphate
  modified_base 17: mod_base = OTHER; note = 2'-O-methyluridine-3'-phosphate
  modified_base 18: mod_base = OTHER; note = 2'-O-methyluridine-3'-phosphate
  modified_base 19: mod_base = OTHER; note = 2'-O-methyluridine-3'-phosphate
  modified_base 20: mod_base = OTHER; note = 2'-O-methylcytidine-3'-phosphate
  modified_base 21: mod_base = OTHER; note = 2'-O-methyladenosine-3'-phosphate ((2S,4R)-1-[29-[[2-(acetylamino)-2-deoxy-beta-D-galactopyra nosyl]oxy]-14,14-bis[[3-[[3-[[5-[[2-(acetylamino)-2-deoxy-b eta-D-galactopyranosyl]oxy]-1-oxopentyl]amino]propyl]amino] -3-oxopropoxy]methyl]-1,12,19,25-tetraoxo-16-oxa-13,20,24-t riazanonacos-1-yl]-4-hydroxy-2-pyrrolidinyl)methyl ester
gtccctggtgtcttagtttca

SEQ ID NO: 135 - RNA, 21 nt, synthetic construct
  source 1..21: mol_type = other RNA
  modified_base 1: mod_base = OTHER; note = 2'-O-methylguanosine-3'-phosphorothioate
  modified_base 2: mod_base = OTHER; note = 2'-O-methyluridine-3'-phosphorothioate
  modified_base 3: mod_base = OTHER; note = 2'-O-methylcytidine-3'-phosphate
  modified_base 4: mod_base = OTHER; note = 2'-O-methyluridine-3'-phosphate
  modified_base 5: mod_base = OTHER; note = 2'-O-methyluridine-3'-phosphate
  modified_base 6: mod_base = OTHER; note = 2'-O-hexadecyl-adenosine-3'-phosphate
  modified_base 7: mod_base = OTHER; note = 2'-deoxy-2'-fluoroguanosine-3'-phosphate
  modified_base 8: mod_base = OTHER; note = 2'-O-methyluridine-3'-phosphate
  modified_base 9: mod_base = OTHER; note = 2'-deoxy-2'-fluorouridine-3'-phosphate
  modified_base 10: mod_base = OTHER; note = 2'-deoxy-2'-fluorouridine-3'-phosphate
  modified_base 11: mod_base = OTHER; note = 2'-deoxy-2'-fluorocytidine-3'-phosphate
  modified_base 12: mod_base = OTHER; note = 2'-O-methylcytidine-3'-phosphate
  modified_base 13: mod_base = OTHER; note = 2'-O-methyladenosine-3'-phosphate
  modified_base 14: mod_base = OTHER; note = 2'-O-methylcytidine-3'-phosphate
  modified_base 15: mod_base = OTHER; note = 2'-O-methyladenosine-3'-phosphate
  modified_base 16: mod_base = OTHER; note = 2'-O-methylguanosine-3'-phosphate
  modified_base 17: mod_base = OTHER; note = 2'-O-methyluridine-3'-phosphate
  modified_base 18: mod_base = OTHER; note = 2'-O-methyladenosine-3'-phosphate
  modified_base 19: mod_base = OTHER; note = 2'-O-methyladenosine-3'-phosphate
  modified_base 20: mod_base = OTHER; note = 2'-O-methylguanosine-3'-phosphate
  modified_base 21: mod_base = OTHER; note = 2'-O-methyladenosine-3'-phosphate ((2S,4R)-1-[29-[[2-(acetylamino)-2-deoxy-beta-D-galactopyra nosyl]oxy]-14,14-bis[[3-[[3-[[5-[[2-(acetylamino)-2-deoxy-b eta-D-galactopyranosyl]oxy]-1-oxopentyl]amino]propyl]amino] -3-oxopropoxy]methyl]-1,12,19,25-tetraoxo-16-oxa-13,20,24-t riazanonacos-1-yl]-4-hydroxy-2-pyrrolidinyl)methyl ester
gtcttagtttccacagtaaga

SEQ ID NO: 136 - RNA, 21 nt, synthetic construct
  source 1..21: mol_type = other RNA
  modified_base 1: mod_base = OTHER; note = 2'-O-methyluridine-3'-phosphorothioate
  modified_base 2: mod_base = OTHER; note = 2'-O-methylcytidine-3'-phosphorothioate
  modified_base 3: mod_base = OTHER; note = 2'-O-methyluridine-3'-phosphate
  modified_base 4: mod_base = OTHER; note = 2'-O-methyluridine-3'-phosphate
  modified_base 5: mod_base = OTHER; note = 2'-O-methyladenosine-3'-phosphate
  modified_base 6: mod_base = OTHER; note = 2'-O-hexadecyl-guanosine-3'-phosphate
  modified_base 7: mod_base = OTHER; note = 2'-deoxy-2'-fluorouridine-3'-phosphate
  modified_base 8: mod_base = OTHER; note = 2'-O-methyluridine-3'-phosphate
  modified_base 9: mod_base = OTHER; note = 2'-deoxy-2'-fluorouridine-3'-phosphate
  modified_base 10: mod_base = OTHER; note = 2'-deoxy-2'-fluorocytidine-3'-phosphate
  modified_base 11: mod_base = OTHER; note = 2'-deoxy-2'-fluorocytidine-3'-phosphate
  modified_base 12: mod_base = OTHER; note = 2'-O-methyladenosine-3'-phosphate
  modified_base 13: mod_base = OTHER; note = 2'-O-methylcytidine-3'-phosphate
  modified_base 14: mod_base = OTHER; note = 2'-O-methyladenosine-3'-phosphate
  modified_base 15: mod_base = OTHER; note = 2'-O-methylguanosine-3'-phosphate
  modified_base 16: mod_base = OTHER; note = 2'-O-methyluridine-3'-phosphate
  modified_base 17: mod_base = OTHER; note = 2'-O-methyladenosine-3'-phosphate
  modified_base 18: mod_base = OTHER; note = 2'-O-methyladenosine-3'-phosphate
  modified_base 19: mod_base = OTHER; note = 2'-O-methylguanosine-3'-phosphate
  modified_base 20: mod_base = OTHER; note = 2'-O-methylguanosine-3'-phosphate
  modified_base 21: mod_base = OTHER; note = 2'-O-methyladenosine-3'-phosphate ((2S,4R)-1-[29-[[2-(acetylamino)-2-deoxy-beta-D-galactopyra nosyl]oxy]-14,14-bis[[3-[[3-[[5-[[2-(acetylamino)-2-deoxy-b eta-D-galactopyranosyl]oxy]-1-oxopentyl]amino]propyl]amino] -3-oxopropoxy]methyl]-1,12,19,25-tetraoxo-16-oxa-13,20,24-t riazanonacos-1-yl]-4-hydroxy-2-pyrrolidinyl)methyl ester
tcttagtttccacagtaagga

SEQ ID NO: 137 - RNA, 21 nt, synthetic construct
  source 1..21: mol_type = other RNA
  modified_base 1: mod_base = OTHER; note = 2'-O-methyluridine-3'-phosphorothioate
  modified_base 2: mod_base = OTHER; note = 2'-O-methyluridine-3'-phosphorothioate
  modified_base 3: mod_base = OTHER; note = 2'-O-methyladenosine-3'-phosphate
  modified_base 4: mod_base = OTHER; note = 2'-O-methylguanosine-3'-phosphate
  modified_base 5: mod_base = OTHER; note = 2'-O-methyluridine-3'-phosphate
  modified_base 6: mod_base = OTHER; note = 2'-O-hexadecyl-uridine-3'-phosphate
  modified_base 7: mod_base = OTHER; note = 2'-deoxy-2'-fluorouridine-3'-phosphate
  modified_base 8: mod_base = OTHER; note = 2'-O-methylcytidine-3'-phosphate
  modified_base 9: mod_base = OTHER; note = 2'-deoxy-2'-fluorocytidine-3'-phosphate
  modified_base 10: mod_base = OTHER; note = 2'-deoxy-2'-fluoroadenosine-3'-phosphate
  modified_base 11: mod_base = OTHER; note = 2'-deoxy-2'-fluorocytidine-3'-phosphate
  modified_base 12: mod_base = OTHER; note = 2'-O-methyladenosine-3'-phosphate
  modified_base 13: mod_base = OTHER; note = 2'-O-methylguanosine-3'-phosphate
  modified_base 14: mod_base = OTHER; note = 2'-O-methyluridine-3'-phosphate
  modified_base 15: mod_base = OTHER; note = 2'-O-methyladenosine-3'-phosphate
  modified_base 16: mod_base = OTHER; note = 2'-O-methyladenosine-3'-phosphate
  modified_base 17: mod_base = OTHER; note = 2'-O-methylguanosine-3'-phosphate
  modified_base 18: mod_base = OTHER; note = 2'-O-methylguanosine-3'-phosphate
  modified_base 19: mod_base = OTHER; note = 2'-O-methyluridine-3'-phosphate
  modified_base 20: mod_base = OTHER; note = 2'-O-methyluridine-3'-phosphate
  modified_base 21: mod_base = OTHER; note = 2'-O-methyladenosine-3'-phosphate ((2S,4R)-1-[29-[[2-(acetylamino)-2-deoxy-beta-D-galactopyra nosyl]oxy]-14,14-bis[[3-[[3-[[5-[[2-(acetylamino)-2-deoxy-b eta-D-galactopyranosyl]oxy]-1-oxopentyl]amino]propyl]amino] -3-oxopropoxy]methyl]-1,12,19,25-tetraoxo-16-oxa-13,20,24-t riazanonacos-1-yl]-4-hydroxy-2-pyrrolidinyl)methyl ester
ttagtttccacagtaaggtta

SEQ ID NO: 138 - RNA, 21 nt, synthetic construct
  source 1..21: mol_type = other RNA
  modified_base 1: mod_base = OTHER; note = 2'-O-methyladenosine-3'-phosphorothioate
  modified_base 2: mod_base = OTHER; note = 2'-O-methylguanosine-3'-phosphorothioate
  modified_base 3: mod_base = OTHER; note = 2'-O-methyladenosine-3'-phosphate
  modified_base 4: mod_base = OTHER; note = 2'-O-methylcytidine-3'-phosphate
  modified_base 5: mod_base = OTHER; note = 2'-O-methylcytidine-3'-phosphate
  modified_base 6: mod_base = OTHER; note = 2'-O-hexadecyl-uridine-3'-phosphate
  modified_base 7: mod_base = OTHER; note = 2'-deoxy-2'-fluorocytidine-3'-phosphate
  modified_base 8: mod_base = OTHER; note = 2'-O-methyluridine-3'-phosphate
  modified_base 9: mod_base = OTHER; note = 2'-deoxy-2'-fluoroguanosine-3'-phosphate
  modified_base 10: mod_base = OTHER; note = 2'-deoxy-2'-fluorouridine-3'-phosphate
  modified_base 11: mod_base = OTHER; note = 2'-deoxy-2'-fluorouridine-3'-phosphate
  modified_base 12: mod_base = OTHER; note = 2'-O-methylcytidine-3'-phosphate
  modified_base 13: mod_base = OTHER; note = 2'-O-methyladenosine-3'-phosphate
  modified_base 14: mod_base = OTHER; note = 2'-O-methyladenosine-3'-phosphate
  modified_base 15: mod_base = OTHER; note = 2'-O-methyluridine-3'-phosphate
  modified_base 16: mod_base = OTHER; note = 2'-O-methyladenosine-3'-phosphate
  modified_base 17: mod_base = OTHER; note = 2'-O-methyladenosine-3'-phosphate
  modified_base 18: mod_base = OTHER; note = 2'-O-methyladenosine-3'-phosphate
  modified_base 19: mod_base = OTHER; note = 2'-O-methyluridine-3'-phosphate
  modified_base 20: mod_base = OTHER; note = 2'-O-methyluridine-3'-phosphate
  modified_base 21: mod_base = OTHER; note = 2'-O-methyladenosine-3'-phosphate ((2S,4R)-1-[29-[[2-(acetylamino)-2-deoxy-beta-D-galactopyra nosyl]oxy]-14,14-bis[[3-[[3-[[5-[[2-(acetylamino)-2-deoxy-b eta-D-galactopyranosyl]oxy]-1-oxopentyl]amino]propyl]amino] -3-oxopropoxy]methyl]-1,12,19,25-tetraoxo-16-oxa-13,20,24-t riazanonacos-1-yl]-4-hydroxy-2-pyrrolidinyl)methyl ester
agacctctgttcaataaatta

SEQ ID NO: 139 - RNA, 21 nt, synthetic construct
  source 1..21: mol_type = other RNA
  modified_base 1: mod_base = OTHER; note = 2'-O-methyladenosine-3'-phosphorothioate
  modified_base 2: mod_base = OTHER; note = 2'-O-methylcytidine-3'-phosphorothioate
  modified_base 3: mod_base = OTHER; note = 2'-O-methylcytidine-3'-phosphate
  modified_base 4: mod_base = OTHER; note = 2'-O-methyluridine-3'-phosphate
  modified_base 5: mod_base = OTHER; note = 2'-O-methylcytidine-3'-phosphate
  modified_base 6: mod_base = OTHER; note = 2'-O-hexadecyl-uridine-3'-phosphate
  modified_base 7: mod_base = OTHER; note = 2'-deoxy-2'-fluoroguanosine-3'-phosphate
  modified_base 8: mod_base = OTHER; note = 2'-O-methyluridine-3'-phosphate
  modified_base 9: mod_base = OTHER; note = 2'-deoxy-2'-fluorouridine-3'-phosphate
  modified_base 10: mod_base = OTHER; note = 2'-deoxy-2'-fluorocytidine-3'-phosphate
  modified_base 11: mod_base = OTHER; note = 2'-deoxy-2'-fluoroadenosine-3'-phosphate
  modified_base 12: mod_base = OTHER; note = 2'-O-methyladenosine-3'-phosphate
  modified_base 13: mod_base = OTHER; note = 2'-O-methyluridine-3'-phosphate
  modified_base 14: mod_base = OTHER; note = 2'-O-methyladenosine-3'-phosphate
  modified_base 15: mod_base = OTHER; note = 2'-O-methyladenosine-3'-phosphate
  modified_base 16: mod_base = OTHER; note = 2'-O-methyladenosine-3'-phosphate
  modified_base 17: mod_base = OTHER; note = 2'-O-methyluridine-3'-phosphate
  modified_base 18: mod_base = OTHER; note = 2'-O-methyluridine-3'-phosphate
  modified_base 19: mod_base = OTHER; note = 2'-O-methyladenosine-3'-phosphate
  modified_base 20: mod_base = OTHER; note = 2'-O-methyluridine-3'-phosphate
  modified_base 21: mod_base = OTHER; note = 2'-O-methyladenosine-3'-phosphate ((2S,4R)-1-[29-[[2-(acetylamino)-2-deoxy-beta-D-galactopyra nosyl]oxy]-14,14-bis[[3-[[3-[[5-[[2-(acetylamino)-2-deoxy-b eta-D-galactopyranosyl]oxy]-1-oxopentyl]amino]propyl]amino] -3-oxopropoxy]methyl]-1,12,19,25-tetraoxo-16-oxa-13,20,24-t riazanonacos-1-yl]-4-hydroxy-2-pyrrolidinyl)methyl ester
acctctgttcaataaattata

SEQ ID NO: 140 - RNA, 21 nt, synthetic construct
  source 1..21: mol_type = other RNA
  modified_base 1: mod_base = OTHER; note = 2'-O-methylcytidine-3'-phosphorothioate
  modified_base 2: mod_base = OTHER; note = 2'-O-methyluridine-3'-phosphorothioate
  modified_base 3: mod_base = OTHER; note = 2'-O-methylcytidine-3'-phosphate
  modified_base 4: mod_base = OTHER; note = 2'-O-methyluridine-3'-phosphate
  modified_base 5: mod_base = OTHER; note = 2'-O-methylguanosine-3'-phosphate
  modified_base 6: mod_base = OTHER; note = 2'-O-hexadecyl-uridine-3'-phosphate
  modified_base 7: mod_base = OTHER; note = 2'-deoxy-2'-fluorouridine-3'-phosphate
  modified_base 8: mod_base = OTHER; note = 2'-O-methylcytidine-3'-phosphate
  modified_base 9: mod_base = OTHER; note = 2'-deoxy-2'-fluoroadenosine-3'-phosphate
  modified_base 10: mod_base = OTHER; note = 2'-deoxy-2'-fluoroadenosine-3'-phosphate
  modified_base 11: mod_base = OTHER; note = 2'-deoxy-2'-fluorouridine-3'-phosphate
  modified_base 12: mod_base = OTHER; note = 2'-O-methyladenosine-3'-phosphate
  modified_base 13: mod_base = OTHER; note = 2'-O-methyladenosine-3'-phosphate
  modified_base 14: mod_base = OTHER; note = 2'-O-methyladenosine-3'-phosphate
  modified_base 15: mod_base = OTHER; note = 2'-O-methyluridine-3'-phosphate
  modified_base 16: mod_base = OTHER; note = 2'-O-methyluridine-3'-phosphate
  modified_base 17: mod_base = OTHER; note = 2'-O-methyladenosine-3'-phosphate
  modified_base 18: mod_base = OTHER; note = 2'-O-methyluridine-3'-phosphate
  modified_base 19: mod_base = OTHER; note = 2'-O-methyluridine-3'-phosphate
  modified_base 20: mod_base = OTHER; note = 2'-O-methylguanosine-3'-phosphate
  modified_base 21: mod_base = OTHER; note = 2'-O-methyladenosine-3'-phosphate ((2S,4R)-1-[29-[[2-(acetylamino)-2-deoxy-beta-D-galactopyra nosyl]oxy]-14,14-bis[[3-[[3-[[5-[[2-(acetylamino)-2-deoxy-b eta-D-galactopyranosyl]oxy]-1-oxopentyl]amino]propyl]amino] -3-oxopropoxy]methyl]-1,12,19,25-tetraoxo-16-oxa-13,20,24-t riazanonacos-1-yl]-4-hydroxy-2-pyrrolidinyl)methyl ester
ctctgttcaataaattattga

SEQ ID NO: 141 - RNA, 21 nt, synthetic construct
  source 1..21: mol_type = other RNA
  modified_base 1: mod_base = OTHER; note = 2'-O-methyluridine-3'-phosphorothioate
  modified_base 2: mod_base = OTHER; note = 2'-O-methylcytidine-3'-phosphorothioate
  modified_base 3: mod_base = OTHER; note = 2'-O-methyluridine-3'-phosphate
  modified_base 4: mod_base = OTHER; note = 2'-O-methylguanosine-3'-phosphate
  modified_base 5: mod_base = OTHER; note = 2'-O-methyluridine-3'-phosphate
  modified_base 6: mod_base = OTHER; note = 2'-O-hexadecyl-uridine-3'-phosphate
  modified_base 7: mod_base = OTHER; note = 2'-deoxy-2'-fluorocytidine-3'-phosphate
  modified_base 8: mod_base = OTHER; note = 2'-O-methyladenosine-3'-phosphate
  modified_base 9: mod_base = OTHER; note = 2'-deoxy-2'-fluoroadenosine-3'-phosphate
  modified_base 10: mod_base = OTHER; note = 2'-deoxy-2'-fluorouridine-3'-phosphate
  modified_base 11: mod_base = OTHER; note = 2'-deoxy-2'-fluoroadenosine-3'-phosphate
  modified_base 12: mod_base = OTHER; note = 2'-O-methyladenosine-3'-phosphate
  modified_base 13: mod_base = OTHER; note = 2'-O-methyladenosine-3'-phosphate
  modified_base 14: mod_base = OTHER; note = 2'-O-methyluridine-3'-phosphate
  modified_base 15: mod_base = OTHER; note = 2'-O-methyluridine-3'-phosphate
  modified_base 16: mod_base = OTHER; note = 2'-O-methyladenosine-3'-phosphate
  modified_base 17: mod_base = OTHER; note = 2'-O-methyluridine-3'-phosphate
  modified_base 18: mod_base = OTHER; note = 2'-O-methyluridine-3'-phosphate
  modified_base 19: mod_base = OTHER; note = 2'-O-methylguanosine-3'-phosphate
  modified_base 20: mod_base = OTHER; note = 2'-O-methylguanosine-3'-phosphate
  modified_base 21: mod_base = OTHER; note = 2'-O-methyladenosine-3'-phosphate ((2S,4R)-1-[29-[[2-(acetylamino)-2-deoxy-beta-D-galactopyra nosyl]oxy]-14,14-bis[[3-[[3-[[5-[[2-(acetylamino)-2-deoxy-b eta-D-galactopyranosyl]oxy]-1-oxopentyl]amino]propyl]amino] -3-oxopropoxy]methyl]-1,12,19,25-tetraoxo-16-oxa-13,20,24-t riazanonacos-1-yl]-4-hydroxy-2-pyrrolidinyl)methyl ester
tctgttcaataaattattgga

SEQ ID NO: 142 - RNA, 21 nt, synthetic construct
  source 1..21: mol_type = other RNA
  modified_base 1: mod_base = OTHER; note = 2'-O-methylcytidine-3'-phosphorothioate
  modified_base 2: mod_base = OTHER; note = 2'-O-methyluridine-3'-phosphorothioate
  modified_base 3: mod_base = OTHER; note = 2'-O-methylguanosine-3'-phosphate
  modified_base 4: mod_base = OTHER; note = 2'-O-methyluridine-3'-phosphate
  modified_base 5: mod_base = OTHER; note = 2'-O-methyluridine-3'-phosphate
  modified_base 6: mod_base = OTHER; note = 2'-O-hexadecyl-cytidine-3'-phosphate
  modified_base 7: mod_base = OTHER; note = 2'-deoxy-2'-fluoroadenosine-3'-phosphate
  modified_base 8: mod_base = OTHER; note = 2'-O-methyladenosine-3'-phosphate
  modified_base 9: mod_base = OTHER; note = 2'-deoxy-2'-fluorouridine-3'-phosphate
  modified_base 10: mod_base = OTHER; note = 2'-deoxy-2'-fluoroadenosine-3'-phosphate
  modified_base 11: mod_base = OTHER; note = 2'-deoxy-2'-fluoroadenosine-3'-phosphate
  modified_base 12: mod_base = OTHER; note = 2'-O-methyladenosine-3'-phosphate
  modified_base 13: mod_base = OTHER; note = 2'-O-methyluridine-3'-phosphate
  modified_base 14: mod_base = OTHER; note = 2'-O-methyluridine-3'-phosphate
  modified_base 15: mod_base = OTHER; note = 2'-O-methyladenosine-3'-phosphate
  modified_base 16: mod_base = OTHER; note = 2'-O-methyluridine-3'-phosphate
  modified_base 17: mod_base = OTHER; note = 2'-O-methyluridine-3'-phosphate
  modified_base 18: mod_base = OTHER; note = 2'-O-methylguanosine-3'-phosphate
  modified_base 19: mod_base = OTHER; note = 2'-O-methylguanosine-3'-phosphate
  modified_base 20: mod_base = OTHER; note = 2'-O-methylcytidine-3'-phosphate
  modified_base 21: mod_base = OTHER; note = 2'-O-methyladenosine-3'-phosphate ((2S,4R)-1-[29-[[2-(acetylamino)-2-deoxy-beta-D-galactopyra nosyl]oxy]-14,14-bis[[3-[[3-[[5-[[2-(acetylamino)-2-deoxy-b eta-D-galactopyranosyl]oxy]-1-oxopentyl]amino]propyl]amino] -3-oxopropoxy]methyl]-1,12,19,25-tetraoxo-16-oxa-13,20,24-t riazanonacos-1-yl]-4-hydroxy-2-pyrrolidinyl)methyl ester
ctgttcaataaattattggca

SEQ ID NO: 143 - RNA, 21 nt, synthetic construct
  source 1..21: mol_type = other RNA
  modified_base 1: mod_base = OTHER; note = 2'-O-methyluridine-3'-phosphorothioate
  modified_base 2: mod_base = OTHER; note = 2'-O-methylguanosine-3'-phosphorothioate
  modified_base 3: mod_base = OTHER; note = 2'-O-methyluridine-3'-phosphate
  modified_base 4: mod_base = OTHER; note = 2'-O-methyluridine-3'-phosphate
  modified_base 5: mod_base = OTHER; note = 2'-O-methylcytidine-3'-phosphate
  modified_base 6: mod_base = OTHER; note = 2'-O-hexadecyl-adenosine-3'-phosphate
  modified_base 7: mod_base = OTHER; note = 2'-deoxy-2'-fluoroadenosine-3'-phosphate
  modified_base 8: mod_base = OTHER; note = 2'-O-methyluridine-3'-phosphate
  modified_base 9: mod_base = OTHER; note = 2'-deoxy-2'-fluoroadenosine-3'-phosphate
  modified_base 10: mod_base = OTHER; note = 2'-deoxy-2'-fluoroadenosine-3'-phosphate
  modified_base 11: mod_base = OTHER; note = 2'-deoxy-2'-fluoroadenosine-3'-phosphate
  modified_base 12: mod_base = OTHER; note = 2'-O-methyluridine-3'-phosphate
  modified_base 13: mod_base = OTHER; note = 2'-O-methyluridine-3'-phosphate
  modified_base 14: mod_base = OTHER; note = 2'-O-methyladenosine-3'-phosphate
  modified_base 15: mod_base = OTHER; note = 2'-O-methyluridine-3'-phosphate
  modified_base 16: mod_base = OTHER; note = 2'-O-methyluridine-3'-phosphate
  modified_base 17: mod_base = OTHER; note = 2'-O-methylguanosine-3'-phosphate
  modified_base 18: mod_base = OTHER; note = 2'-O-methylguanosine-3'-phosphate
  modified_base 19: mod_base = OTHER; note = 2'-O-methylcytidine-3'-phosphate
  modified_base 20: mod_base = OTHER; note = 2'-O-methyladenosine-3'-phosphate
  modified_base 21: mod_base = OTHER; note = 2'-O-methyladenosine-3'-phosphate ((2S,4R)-1-[29-[[2-(acetylamino)-2-deoxy-beta-D-galactopyra nosyl]oxy]-14,14-bis[[3-[[3-[[5-[[2-(acetylamino)-2-deoxy-b eta-D-galactopyranosyl]oxy]-1-oxopentyl]amino]propyl]amino] -3-oxopropoxy]methyl]-1,12,19,25-tetraoxo-16-oxa-13,20,24-t riazanonacos-1-yl]-4-hydroxy-2-pyrrolidinyl)methyl ester
tgttcaataaattattggcaa

SEQ ID NO: 144 - RNA, 21 nt, synthetic construct
  source 1..21: mol_type = other RNA
  modified_base 1: mod_base = OTHER; note = 2'-O-methyluridine-3'-phosphorothioate
  modified_base 2: mod_base = OTHER; note = 2'-O-methyluridine-3'-phosphorothioate
  modified_base 3: mod_base = OTHER; note = 2'-O-methylcytidine-3'-phosphate
  modified_base 4: mod_base = OTHER; note = 2'-O-methyladenosine-3'-phosphate
  modified_base 5: mod_base = OTHER; note = 2'-O-methyladenosine-3'-phosphate
  modified_base 6: mod_base = OTHER; note = 2'-O-hexadecyl-uridine-3'-phosphate
  modified_base 7: mod_base = OTHER; note = 2'-deoxy-2'-fluoroadenosine-3'-phosphate
  modified_base 8: mod_base = OTHER; note = 2'-O-methyladenosine-3'-phosphate
  modified_base 9: mod_base = OTHER; note = 2'-deoxy-2'-fluoroadenosine-3'-phosphate
  modified_base 10: mod_base = OTHER; note = 2'-deoxy-2'-fluorouridine-3'-phosphate
  modified_base 11: mod_base = OTHER; note = 2'-deoxy-2'-fluorouridine-3'-phosphate
  modified_base 12: mod_base = OTHER; note = 2'-O-methyladenosine-3'-phosphate
  modified_base 13: mod_base = OTHER; note = 2'-O-methyluridine-3'-phosphate
  modified_base 14: mod_base = OTHER; note = 2'-O-methyluridine-3'-phosphate
  modified_base 15: mod_base = OTHER; note = 2'-O-methylguanosine-3'-phosphate
  modified_base 16: mod_base = OTHER; note = 2'-O-methylguanosine-3'-phosphate
  modified_base 17: mod_base = OTHER; note = 2'-O-methylcytidine-3'-phosphate
  modified_base 18: mod_base = OTHER; note = 2'-O-methyladenosine-3'-phosphate
  modified_base 19: mod_base = OTHER; note = 2'-O-methyluridine-3'-phosphate
  modified_base 20: mod_base = OTHER; note = 2'-O-methylguanosine-3'-phosphate
  modified_base 21: mod_base = OTHER; note = 2'-O-methyladenosine-3'-phosphate ((2S,4R)-1-[29-[[2-(acetylamino)-2-deoxy-beta-D-galactopyra nosyl]oxy]-14,14-bis[[3-[[3-[[5-[[2-(acetylamino)-2-deoxy-b eta-D-galactopyranosyl]oxy]-1-oxopentyl]amino]propyl]amino] -3-oxopropoxy]methyl]-1,12,19,25-tetraoxo-16-oxa-13,20,24-t riazanonacos-1-yl]-4-hydroxy-2-pyrrolidinyl)methyl ester
ttcaataaattattggcatga

SEQ ID NO: 145 - RNA, 23 nt, synthetic construct
  source 1..23: mol_type = other RNA
  modified_base 1: mod_base = OTHER; note = 2'-O-methyluridine-3'-phosphorothioate 5'-(E)-Vinylphosphonate
  modified_base 2: mod_base = OTHER; note = 2'-deoxy-2'-fluorocytidine-3'-phosphorothioate
  modified_base 3: mod_base = OTHER; note = 2'-O-methyladenosine-3'-phosphate
  modified_base 4: mod_base = OTHER; note = 2'-O-methylcytidine-3'-phosphate
  modified_base 5: mod_base = OTHER; note = 2'-O-methyluridine-3'-phosphate
  modified_base 6: mod_base = OTHER; note = 2'-deoxy-2'-fluorouridine-3'-phosphate
  modified_base 7: mod_base = OTHER; note = 2'-O-methyluridine-3'-phosphate
  modified_base 8: mod_base = OTHER; note = 2'-deoxy-2'-fluoroguanosine-3'-phosphate
  modified_base 9: mod_base = OTHER; note = 2'-deoxy-2'-fluoroadenosine-3'-phosphate
  modified_base 10: mod_base = OTHER; note = 2'-O-methyluridine-3'-phosphate
  modified_base 11: mod_base = OTHER; note = 2'-O-methylguanosine-3'-phosphate
  modified_base 12: mod_base = OTHER; note = 2'-O-methyluridine-3'-phosphate
  modified_base 13: mod_base = OTHER; note = 2'-O-methylcytidine-3'-phosphate
  modified_base 14: mod_base = OTHER; note = 2'-deoxy-2'-fluoroadenosine-3'-phosphate
  modified_base 15: mod_base = OTHER; note = 2'-O-methylguanosine-3'-phosphate
  modified_base 16: mod_base = OTHER; note = 2'-deoxy-2'-fluorouridine-3'-phosphate
  modified_base 17: mod_base = OTHER; note = 2'-O-methylguanosine-3'-phosphate
  modified_base 18: mod_base = OTHER; note = 2'-O-methyluridine-3'-phosphate
  modified_base 19: mod_base = OTHER; note = 2'-O-methyladenosine-3'-phosphate
  modified_base 20: mod_base = OTHER; note = 2'-O-methyladenosine-3'-phosphate
  modified_base 21: mod_base = OTHER; note = 2'-O-methylguanosine-3'-phosphorothioate
  modified_base 22: mod_base = OTHER; note = 2'-O-methylcytidine-3'-phosphorothioate
  modified_base 23: mod_base = OTHER; note = 2'-O-methylcytidine
tcactttgatgtcagtgtaagcc

SEQ ID NO: 146 - RNA, 23 nt, synthetic construct
  source 1..23: mol_type = other RNA
  modified_base 1: mod_base = OTHER; note = 2'-O-methyluridine-3'-phosphorothioate 5'-(E)-Vinylphosphonate
  modified_base 2: mod_base = OTHER; note = 2'-deoxy-2'-fluorouridine-3'-phosphorothioate
  modified_base 3: mod_base = OTHER; note = 2'-O-methyladenosine-3'-phosphate
  modified_base 4: mod_base = OTHER; note = 2'-O-methylcytidine-3'-phosphate
  modified_base 5: mod_base = OTHER; note = 2'-O-methylcytidine-3'-phosphate
  modified_base 6: mod_base = OTHER; note = 2'-deoxy-2'-fluoroadenosine-3'-phosphate
  modified_base 7: mod_base = OTHER; note = 2'-O-methyladenosine-3'-phosphate
  modified_base 8: mod_base = OTHER; note = 2'-deoxy-2'-fluorouridine-3'-phosphate
  modified_base 9: mod_base = OTHER; note = 2'-deoxy-2'-fluorocytidine-3'-phosphate
  modified_base 10: mod_base = OTHER; note = 2'-O-methyladenosine-3'-phosphate
  modified_base 11: mod_base = OTHER; note = 2'-O-methylcytidine-3'-phosphate
  modified_base 12: mod_base = OTHER; note = 2'-O-methyluridine-3'-phosphate
  modified_base 13: mod_base = OTHER; note = 2'-O-methyluridine-3'-phosphate
  modified_base 14: mod_base = OTHER; note = 2'-deoxy-2'-fluorouridine-3'-phosphate
  modified_base 15: mod_base = OTHER; note = 2'-O-methylguanosine-3'-phosphate
  modified_base 16: mod_base = OTHER; note = 2'-deoxy-2'-fluoroadenosine-3'-phosphate
  modified_base 17: mod_base = OTHER; note = 2'-O-methyluridine-3'-phosphate
  modified_base 18: mod_base = OTHER; note = 2'-O-methylguanosine-3'-phosphate
  modified_base 19: mod_base = OTHER; note = 2'-O-methyluridine-3'-phosphate
  modified_base 20: mod_base = OTHER; note = 2'-O-methylcytidine-3'-phosphate
  modified_base 21: mod_base = OTHER; note = 2'-O-methyladenosine-3'-phosphorothioate
  modified_base 22: mod_base = OTHER; note = 2'-O-methylguanosine-3'-phosphorothioate
  modified_base 23: mod_base = OTHER; note = 2'-O-methyluridine
ttaccaatcactttgatgtcagt

SEQ ID NO: 147 - RNA, 23 nt, synthetic construct
  source 1..23: mol_type = other RNA
  modified_base 1: mod_base = OTHER; note = 2'-O-methyluridine-3'-phosphorothioate 5'-(E)-Vinylphosphonate
  modified_base 2: mod_base = OTHER; note = 2'-deoxy-2'-fluorocytidine-3'-phosphorothioate
  modified_base 3: mod_base = OTHER; note = 2'-O-methyluridine-3'-phosphate
  modified_base 4: mod_base = OTHER; note = 2'-O-methylguanosine-3'-phosphate
  modified_base 5: mod_base = OTHER; note = 2'-O-methyladenosine-3'-phosphate
  modified_base 6: mod_base = OTHER; note = 2'-deoxy-2'-fluoroadenosine-3'-phosphate
  modified_base 7: mod_base = OTHER; note = 2'-O-methylguanosine-3'-phosphate
  modified_base 8: mod_base = OTHER; note = 2'-deoxy-2'-fluoroadenosine-3'-phosphate
  modified_base 9: mod_base = OTHER; note = 2'-deoxy-2'-fluoroadenosine-3'-phosphate
  modified_base 10: mod_base = OTHER; note = 2'-O-methylcytidine-3'-phosphate
  modified_base 11: mod_base = OTHER; note = 2'-O-methylcytidine-3'-phosphate
  modified_base 12: mod_base = OTHER; note = 2'-O-methyluridine-3'-phosphate
  modified_base 13: mod_base = OTHER; note = 2'-O-methyluridine-3'-phosphate
  modified_base 14: mod_base = OTHER; note = 2'-deoxy-2'-fluorocytidine-3'-phosphate
  modified_base 15: mod_base = OTHER; note = 2'-O-methyluridine-3'-phosphate
  modified_base 16: mod_base = OTHER; note = 2'-deoxy-2'-fluorouridine-3'-phosphate
  modified_base 17: mod_base = OTHER; note = 2'-O-methylguanosine-3'-phosphate
  modified_base 18: mod_base = OTHER; note = 2'-O-methyladenosine-3'-phosphate
  modified_base 19: mod_base = OTHER; note = 2'-O-methyluridine-3'-phosphate
  modified_base 20: mod_base = OTHER; note = 2'-O-methylguanosine-3'-phosphate
  modified_base 21: mod_base = OTHER; note = 2'-O-methylguanosine-3'-phosphorothioate
  modified_base 22: mod_base = OTHER; note = 2'-O-methylcytidine-3'-phosphorothioate
  modified_base 23: mod_base = OTHER; note = 2'-O-methylcytidine
tctgaagaaccttcttgatggcc

SEQ ID NO: 148 - RNA, 23 nt, synthetic construct
  source 1..23: mol_type = other RNA
  modified_base 1: mod_base = OTHER; note = 2'-O-methyluridine-3'-phosphorothioate 5'-(E)-Vinylphosphonate
  modified_base 2: mod_base = OTHER; note = 2'-deoxy-2'-fluorocytidine-3'-phosphorothioate
  modified_base 3: mod_base = OTHER; note = 2'-O-methylcytidine-3'-phosphate
  modified_base 4: mod_base = OTHER; note = 2'-O-methyluridine-3'-phosphate
  modified_base 5: mod_base = OTHER; note = 2'-O-methyluridine-3'-phosphate
  modified_base 6: mod_base = OTHER; note = 2'-deoxy-2'-fluorouridine-3'-phosphate
  modified_base 7: mod_base = OTHER; note = 2'-O-methyluridine-3'-phosphate
  modified_base 8: mod_base = OTHER; note = 2'-deoxy-2'-fluoroguanosine-3'-phosphate
  modified_base 9: mod_base = OTHER; note = 2'-deoxy-2'-fluorouridine-3'-phosphate
  modified_base 10: mod_base = OTHER; note = 2'-O-methylcytidine-3'-phosphate
  modified_base 11: mod_base = OTHER; note = 2'-O-methylcytidine-3'-phosphate
  modified_base 12: mod_base = OTHER; note = 2'-O-methyluridine-3'-phosphate
  modified_base 13: mod_base = OTHER; note = 2'-O-methylguanosine-3'-phosphate
  modified_base 14: mod_base = OTHER; note = 2'-deoxy-2'-fluoroadenosine-3'-phosphate
  modified_base 15: mod_base = OTHER; note = 2'-O-methyladenosine-3'-phosphate
  modified_base 16: mod_base = OTHER; note = 2'-deoxy-2'-fluoroguanosine-3'-phosphate
  modified_base 17: mod_base = OTHER; note = 2'-O-methyladenosine-3'-phosphate
  modified_base 18: mod_base = OTHER; note = 2'-O-methyladenosine-3'-phosphate
  modified_base 19: mod_base = OTHER; note = 2'-O-methylcytidine-3'-phosphate
  modified_base 20: mod_base = OTHER; note = 2'-O-methylcytidine-3'-phosphate
  modified_base 21: mod_base = OTHER; note = 2'-O-methyluridine-3'-phosphorothioate
  modified_base 22: mod_base = OTHER; note = 2'-O-methyluridine-3'-phosphorothioate
  modified_base 23: mod_base = OTHER; note = 2'-O-methylcytidine
tccttttgtcctgaagaaccttc

SEQ ID NO: 149 - RNA, 23 nt, synthetic construct
  source 1..23: mol_type = other RNA
  modified_base 1: mod_base = OTHER; note = 2'-O-methyluridine-3'-phosphorothioate 5'-(E)-Vinylphosphonate
  modified_base 2: mod_base = OTHER; note = 2'-deoxy-2'-fluoroadenosine-3'-phosphorothioate
  modified_base 3: mod_base = OTHER; note = 2'-O-methylcytidine-3'-phosphate
  modified_base 4: mod_base = OTHER; note = 2'-O-methylcytidine-3'-phosphate
  modified_base 5: mod_base = OTHER; note = 2'-O-methyluridine-3'-phosphate
  modified_base 6: mod_base = OTHER; note = 2'-deoxy-2'-fluorouridine-3'-phosphate
  modified_base 7: mod_base = OTHER; note = 2'-O-methyluridine-3'-phosphate
  modified_base 8: mod_base = OTHER; note = 2'-deoxy-2'-fluorouridine-3'-phosphate
  modified_base 9: mod_base = OTHER; note = 2'-deoxy-2'-fluoroguanosine-3'-phosphate
  modified_base 10: mod_base = OTHER; note = 2'-O-methyluridine-3'-phosphate
  modified_base 11: mod_base = OTHER; note = 2'-O-methylcytidine-3'-phosphate
  modified_base 12: mod_base = OTHER; note = 2'-O-methylcytidine-3'-phosphate
  modified_base 13: mod_base = OTHER; note = 2'-O-methyluridine-3'-phosphate
  modified_base 14: mod_base = OTHER; note = 2'-deoxy-2'-fluoroguanosine-3'-phosphate
  modified_base 15: mod_base = OTHER; note = 2'-O-methyladenosine-3'-phosphate
  modified_base 16: mod_base = OTHER; note = 2'-deoxy-2'-fluoroadenosine-3'-phosphate
  modified_base 17: mod_base = OTHER; note = 2'-O-methylguanosine-3'-phosphate
  modified_base 18: mod_base = OTHER; note = 2'-O-methyladenosine-3'-phosphate
  modified_base 19: mod_base = OTHER; note = 2'-O-methyladenosine-3'-phosphate
  modified_base 20: mod_base = OTHER; note = 2'-O-methylcytidine-3'-phosphate
  modified_base 21: mod_base = OTHER; note = 2'-O-methylcytidine-3'-phosphorothioate
  modified_base 22: mod_base = OTHER; note = 2'-O-methyluridine-3'-phosphorothioate
  modified_base 23: mod_base = OTHER; note = 2'-O-methyluridine
taccttttgtcctgaagaacctt

SEQ ID NO: 150 - RNA, 23 nt, synthetic construct
  source 1..23: mol_type = other RNA
  modified_base 1: mod_base = OTHER; note = 2'-O-methyluridine-3'-phosphorothioate 5'-(E)-Vinylphosphonate
  modified_base 2: mod_base = OTHER; note = 2'-deoxy-2'-fluoroadenosine-3'-phosphorothioate
  modified_base 3: mod_base = OTHER; note = 2'-O-methyladenosine-3'-phosphate
  modified_base 4: mod_base = OTHER; note = 2'-O-methylcytidine-3'-phosphate
  modified_base 5: mod_base = OTHER; note = 2'-O-methylcytidine-3'-phosphate
  modified_base 6: mod_base = OTHER; note = 2'-deoxy-2'-fluorouridine-3'-phosphate
  modified_base 7: mod_base = OTHER; note = 2'-O-methyluridine-3'-phosphate
  modified_base 8: mod_base = OTHER; note = 2'-deoxy-2'-fluorouridine-3'-phosphate
  modified_base 9: mod_base = OTHER; note = 2'-deoxy-2'-fluorouridine-3'-phosphate
  modified_base 10: mod_base = OTHER; note = 2'-O-methylguanosine-3'-phosphate
  modified_base 11: mod_base = OTHER; note = 2'-O-methyluridine-3'-phosphate
  modified_base 12: mod_base = OTHER; note = 2'-O-methylcytidine-3'-phosphate
  modified_base 13: mod_base = OTHER; note = 2'-O-methylcytidine-3'-phosphate
  modified_base 14: mod_base = OTHER; note = 2'-deoxy-2'-fluorouridine-3'-phosphate
  modified_base 15: mod_base = OTHER; note = 2'-O-methylguanosine-3'-phosphate
  modified_base 16: mod_base = OTHER; note = 2'-deoxy-2'-fluoroadenosine-3'-phosphate
  modified_base 17: mod_base = OTHER; note = 2'-O-methyladenosine-3'-phosphate
  modified_base 18: mod_base = OTHER; note = 2'-O-methylguanosine-3'-phosphate
  modified_base 19: mod_base = OTHER; note = 2'-O-methyladenosine-3'-phosphate
  modified_base 20: mod_base = OTHER; note = 2'-O-methyladenosine-3'-phosphate
  modified_base 21: mod_base = OTHER; note = 2'-O-methylcytidine-3'-phosphorothioate
  modified_base 22: mod_base = OTHER; note = 2'-O-methylcytidine-3'-phosphorothioate
  modified_base 23: mod_base = OTHER; note = 2'-O-methyluridine
taaccttttgtcctgaagaacct

SEQ ID NO: 151 - RNA, 23 nt, synthetic construct
  source 1..23: mol_type = other RNA
  modified_base 1: mod_base = OTHER; note = 2'-O-methyluridine-3'-phosphorothioate 5'-(E)-Vinylphosphonate
  modified_base 2: mod_base = OTHER; note = 2'-deoxy-2'-fluorouridine-3'-phosphorothioate
  modified_base 3: mod_base = OTHER; note = 2'-O-methyladenosine-3'-phosphate
  modified_base 4: mod_base = OTHER; note = 2'-O-methylcytidine-3'-phosphate
  modified_base 5: mod_base = OTHER; note = 2'-O-methylguanosine-3'-phosphate
  modified_base 6: mod_base = OTHER; note = 2'-deoxy-2'-fluorocytidine-3'-phosphate
  modified_base 7: mod_base = OTHER; note = 2'-O-methyladenosine-3'-phosphate
  modified_base 8: mod_base = OTHER; note = 2'-deoxy-2'-fluorouridine-3'-phosphate
  modified_base 9: mod_base = OTHER; note = 2'-deoxy-2'-fluoroadenosine-3'-phosphate
  modified_base 10: mod_base = OTHER; note = 2'-O-methyladenosine-3'-phosphate
  modified_base 11: mod_base = OTHER; note = 2'-O-methyluridine-3'-phosphate
  modified_base 12: mod_base = OTHER; note = 2'-O-methylcytidine-3'-phosphate
  modified_base 13: mod_base = OTHER; note = 2'-O-methyluridine-3'-phosphate
  modified_base 14: mod_base = OTHER; note = 2'-deoxy-2'-fluoroguanosine-3'-phosphate
  modified_base 15: mod_base = OTHER; note = 2'-O-methylcytidine-3'-phosphate
  modified_base 16: mod_base = OTHER; note = 2'-deoxy-2'-fluoroadenosine-3'-phosphate
  modified_base 17: mod_base = OTHER; note = 2'-O-methylguanosine-3'-phosphate
  modified_base 18: mod_base = OTHER; note = 2'-O-methyluridine-3'-phosphate
  modified_base 19: mod_base = OTHER; note = 2'-O-methyluridine-3'-phosphate
  modified_base 20: mod_base = OTHER; note = 2'-O-methylcytidine-3'-phosphate
  modified_base 21: mod_base = OTHER; note = 2'-O-methyluridine-3'-phosphorothioate
  modified_base 22: mod_base = OTHER; note = 2'-O-methylcytidine-3'-phosphorothioate
  modified_base 23: mod_base = OTHER; note = 2'-O-methylguanosine
ttacgcataatctgcagttctcg

SEQ ID NO: 152 - RNA, 23 nt, synthetic construct
  source 1..23: mol_type = other RNA
  modified_base 1: mod_base = OTHER; note = 2'-O-methyluridine-3'-phosphorothioate 5'-(E)-Vinylphosphonate
  modified_base 2: mod_base = OTHER; note = 2'-deoxy-2'-fluorocytidine-3'-phosphorothioate
  modified_base 3: mod_base = OTHER; note = 2'-O-methyladenosine-3'-phosphate
  modified_base 4: mod_base = OTHER; note = 2'-O-methylguanosine-3'-phosphate
  modified_base 5: mod_base = OTHER; note = 2'-O-methylcytidine-3'-phosphate
  modified_base 6: mod_base = OTHER; note = 2'-deoxy-2'-fluorouridine-3'-phosphate
  modified_base 7: mod_base = OTHER; note = 2'-O-methyluridine-3'-phosphate
  modified_base 8: mod_base = OTHER; note = 2'-deoxy-2'-fluoroadenosine-3'-phosphate
  modified_base 9: mod_base = OTHER; note = 2'-deoxy-2'-fluorocytidine-3'-phosphate
  modified_base 10: mod_base = OTHER; note = 2'-O-methylguanosine-3'-phosphate
  modified_base 11: mod_base = OTHER; note = 2'-O-methylcytidine-3'-phosphate
  modified_base 12: mod_base = OTHER; note = 2'-O-methyladenosine-3'-phosphate
  modified_base 13: mod_base = OTHER; note = 2'-O-methyluridine-3'-phosphate
  modified_base 14: mod_base = OTHER; note = 2'-deoxy-2'-fluoroadenosine-3'-phosphate
  modified_base 15: mod_base = OTHER; note = 2'-O-methyladenosine-3'-phosphate
  modified_base 16: mod_base = OTHER; note = 2'-deoxy-2'-fluorouridine-3'-phosphate
  modified_base 17: mod_base = OTHER; note = 2'-O-methylcytidine-3'-phosphate
  modified_base 18: mod_base = OTHER; note = 2'-O-methyluridine-3'-phosphate
  modified_base 19: mod_base = OTHER; note = 2'-O-methylguanosine-3'-phosphate
  modified_base 20: mod_base = OTHER; note = 2'-O-methylcytidine-3'-phosphate
  modified_base 21: mod_base = OTHER; note = 2'-O-methyladenosine-3'-phosphorothioate
  modified_base 22: mod_base = OTHER; note = 2'-O-methylguanosine-3'-phosphorothioate
  modified_base 23: mod_base = OTHER; note = 2'-O-methyluridine
tcagcttacgcataatctgcagt

SEQ ID NO: 153 - RNA, 23 nt, synthetic construct
  source 1..23: mol_type = other RNA
  modified_base 1: mod_base = OTHER; note = 2'-O-methyluridine-3'-phosphorothioate 5'-(E)-Vinylphosphonate
  modified_base 2: mod_base = OTHER; note = 2'-deoxy-2'-fluoroadenosine-3'-phosphorothioate
  modified_base 3: mod_base = OTHER; note = 2'-O-methylcytidine-3'-phosphate
  modified_base 4: mod_base = OTHER; note = 2'-O-methyladenosine-3'-phosphate
  modified_base 5: mod_base = OTHER; note = 2'-O-methylcytidine-3'-phosphate
  modified_base 6: mod_base = OTHER; note = 2'-deoxy-2'-fluorocytidine-3'-phosphate
  modified_base 7: mod_base = OTHER; note = 2'-O-methyluridine-3'-phosphate
  modified_base 8: mod_base = OTHER; note = 2'-deoxy-2'-fluorouridine-3'-phosphate
  modified_base 9: mod_base = OTHER; note = 2'-deoxy-2'-fluoroguanosine-3'-phosphate
  modified_base 10: mod_base = OTHER; note = 2'-O-methyladenosine-3'-phosphate
  modified_base 11: mod_base = OTHER; note = 2'-O-methyluridine-3'-phosphate
  modified_base 12: mod_base = OTHER; note = 2'-O-methylguanosine-3'-phosphate
  modified_base 13: mod_base = OTHER; note = 2'-O-methyluridine-3'-phosphate
  modified_base 14: mod_base = OTHER; note = 2'-deoxy-2'-fluoroadenosine-3'-phosphate
  modified_base 15: mod_base = OTHER; note = 2'-O-methylguanosine-3'-phosphate
  modified_base 16: mod_base = OTHER; note = 2'-deoxy-2'-fluoroadenosine-3'-phosphate
  modified_base 17: mod_base = OTHER; note = 2'-O-methyluridine-3'-phosphate
  modified_base 18: mod_base = OTHER; note = 2'-O-methylguanosine-3'-phosphate
  modified_base 19: mod_base = OTHER; note = 2'-O-methyladenosine-3'-phosphate
  modified_base 20: mod_base = OTHER; note = 2'-O-methyluridine-3'-phosphate
  modified_base 21: mod_base = OTHER; note = 2'-O-methyladenosine-3'-phosphorothioate
  modified_base 22: mod_base = OTHER; note = 2'-O-methylguanosine-3'-phosphorothioate
  modified_base 23: mod_base = OTHER; note = 2'-O-methylguanosine
tacaccttgatgtagatgatagg

SEQ ID NO: 154 - RNA, 23 nt, synthetic construct
  source 1..23: mol_type = other RNA
  modified_base 1: mod_base = OTHER; note = 2'-O-methyluridine-3'-phosphorothioate 5'-(E)-Vinylphosphonate
  modified_base 2: mod_base = OTHER; note = 2'-deoxy-2'-fluoroadenosine-3'-phosphorothioate
  modified_base 3: mod_base = OTHER; note = 2'-O-methyladenosine-3'-phosphate
  modified_base 4: mod_base = OTHER; note = 2'-O-methyluridine-3'-phosphate
  modified_base 5: mod_base = OTHER; note = 2'-O-methylcytidine-3'-phosphate
  modified_base 6: mod_base = OTHER; note = 2'-deoxy-2'-fluoroguanosine-3'-phosphate
  modified_base 7: mod_base = OTHER; note = 2'-O-methylcytidine-3'-phosphate
  modified_base 8: mod_base = OTHER; note = 2'-deoxy-2'-fluoroadenosine-3'-phosphate
  modified_base 9: mod_base = OTHER; note = 2'-deoxy-2'-fluoroguanosine-3'-phosphate
  modified_base 10: mod_base = OTHER; note = 2'-O-methyladenosine-3'-phosphate
  modified_base 11: mod_base = OTHER; note = 2'-O-methylguanosine-3'-phosphate
  modified_base 12: mod_base = OTHER; note = 2'-O-methylcytidine-3'-phosphate
  modified_base 13: mod_base = OTHER; note = 2'-O-methyluridine-3'-phosphate
  modified_base 14: mod_base = OTHER; note = 2'-deoxy-2'-fluorouridine-3'-phosphate
  modified_base 15: mod_base = OTHER; note = 2'-O-methylguanosine-3'-phosphate
  modified_base 16: mod_base = OTHER; note = 2'-deoxy-2'-fluoroadenosine-3'-phosphate
  modified_base 17: mod_base = OTHER; note = 2'-O-methylguanosine-3'-phosphate
  modified_base 18: mod_base = OTHER; note = 2'-O-methylguanosine-3'-phosphate
  modified_base 19: mod_base = OTHER; note = 2'-O-methyladenosine-3'-phosphate
  modified_base 20: mod_base = OTHER; note = 2'-O-methylcytidine-3'-phosphate
  modified_base 21: mod_base = OTHER; note = 2'-O-methyladenosine-3'-phosphorothioate
  modified_base 22: mod_base = OTHER; note = 2'-O-methylguanosine-3'-phosphorothioate
  modified_base 23: mod_base = OTHER; note = 2'-O-methylcytidine
taatcgcagagcttgaggacagc

SEQ ID NO: 155 - RNA, 23 nt, synthetic construct
  source 1..23: mol_type = other RNA
  modified_base 1: mod_base = OTHER; note = 2'-O-methyluridine-3'-phosphorothioate 5'-(E)-Vinylphosphonate
  modified_base 2: mod_base = OTHER; note = 2'-deoxy-2'-fluorocytidine-3'-phosphorothioate
  modified_base 3: mod_base = OTHER; note = 2'-O-methylcytidine-3'-phosphate
  modified_base 4: mod_base = OTHER; note = 2'-O-methyladenosine-3'-phosphate
  modified_base 5: mod_base = OTHER; note = 2'-O-methyladenosine-3'-phosphate
  modified_base 6: mod_base = OTHER; note = 2'-deoxy-2'-fluoroadenosine-3'-phosphate
  modified_base 7: mod_base = OTHER; note = 2'-O-methyladenosine-3'-phosphate
  modified_base 8: mod_base = OTHER; note = 2'-deoxy-2'-fluorouridine-3'-phosphate
  modified_base 9: mod_base = OTHER; note = 2'-deoxy-2'-fluorocytidine-3'-phosphate
  modified_base 10: mod_base = OTHER; note = 2'-O-methylguanosine-3'-phosphate
  modified_base 11: mod_base = OTHER; note = 2'-O-methylcytidine-3'-phosphate
  modified_base 12: mod_base = OTHER; note = 2'-O-methyladenosine-3'-phosphate
  modified_base 13: mod_base = OTHER; note = 2'-O-methylguanosine-3'-phosphate
  modified_base 14: mod_base = OTHER; note = 2'-deoxy-2'-fluoroadenosine-3'-phosphate
  modified_base 15: mod_base = OTHER; note = 2'-O-methylguanosine-3'-phosphate
  modified_base 16: mod_base = OTHER; note = 2'-deoxy-2'-fluorocytidine-3'-phosphate
  modified_base 17: mod_base = OTHER; note = 2'-O-methyluridine-3'-phosphate
  modified_base 18: mod_base = OTHER; note = 2'-O-methyluridine-3'-phosphate
  modified_base 19: mod_base = OTHER; note = 2'-O-methylguanosine-3'-phosphate
  modified_base 20: mod_base = OTHER; note = 2'-O-methyladenosine-3'-phosphate
  modified_base 21: mod_base = OTHER; note = 2'-O-methylguanosine-3'-phosphorothioate
  modified_base 22: mod_base = OTHER; note = 2'-O-methylguanosine-3'-phosphorothioate
  modified_base 23: mod_base = OTHER; note = 2'-O-methyladenosine
tccaaaatcgcagagcttgagga

SEQ ID NO: 156 - RNA, 23 nt, synthetic construct
  source 1..23: mol_type = other RNA
  modified_base 1: mod_base = OTHER; note = 2'-O-methyluridine-3'-phosphorothioate 5'-(E)-Vinylphosphonate
  modified_base 2: mod_base = OTHER; note = 2'-deoxy-2'-fluoroguanosine-3'-phosphorothioate
  modified_base 3: mod_base = OTHER; note = 2'-O-methylcytidine-3'-phosphate
  modified_base 4: mod_base = OTHER; note = 2'-O-methylcytidine-3'-phosphate
  modified_base 5: mod_base = OTHER; note = 2'-O-methyladenosine-3'-phosphate
  modified_base 6: mod_base = OTHER; note = 2'-deoxy-2'-fluoroadenosine-3'-phosphate
  modified_base 7: mod_base = OTHER; note = 2'-O-methyladenosine-3'-phosphate
  modified_base 8: mod_base = OTHER; note = 2'-deoxy-2'-fluoroadenosine-3'-phosphate
  modified_base 9: mod_base = OTHER; note = 2'-deoxy-2'-fluorouridine-3'-phosphate
  modified_base 10: mod_base = OTHER; note = 2'-O-methylcytidine-3'-phosphate
  modified_base 11: mod_base = OTHER; note = 2'-O-methylguanosine-3'-phosphate
  modified_base 12: mod_base = OTHER; note = 2'-O-methylcytidine-3'-phosphate
  modified_base 13: mod_base = OTHER; note = 2'-O-methyladenosine-3'-phosphate
  modified_base 14: mod_base = OTHER; note = 2'-deoxy-2'-fluoroguanosine-3'-phosphate
  modified_base 15: mod_base = OTHER; note = 2'-O-methyladenosine-3'-phosphate
  modified_base 16: mod_base = OTHER; note = 2'-deoxy-2'-fluoroguanosine-3'-phosphate
  modified_base 17: mod_base = OTHER; note = 2'-O-methylcytidine-3'-phosphate
  modified_base 18: mod_base = OTHER; note = 2'-O-methyluridine-3'-phosphate
  modified_base 19: mod_base = OTHER; note = 2'-O-methyluridine-3'-phosphate
  modified_base 20: mod_base = OTHER; note = 2'-O-methylguanosine-3'-phosphate
  modified_base 21: mod_base = OTHER; note = 2'-O-methyladenosine-3'-phosphorothioate
  modified_base 22: mod_base = OTHER; note = 2'-O-methylguanosine-3'-phosphorothioate
  modified_base 23: mod_base = OTHER; note = 2'-O-methylguanosine
tgccaaaatcgcagagcttgagg

SEQ ID NO: 157 - RNA, 23 nt, synthetic construct
  source 1..23: mol_type = other RNA
  modified_base 1: mod_base = OTHER; note = 2'-O-methyluridine-3'-phosphorothioate 5'-(E)-Vinylphosphonate
  modified_base 2: mod_base = OTHER; note = 2'-deoxy-2'-fluorouridine-3'-phosphorothioate
  modified_base 3: mod_base = OTHER; note = 2'-O-methylguanosine-3'-phosphate
  modified_base 4: mod_base = OTHER; note = 2'-O-methylcytidine-3'-phosphate
  modified_base 5: mod_base = OTHER; note = 2'-O-methylcytidine-3'-phosphate
  modified_base 6: mod_base = OTHER; note = 2'-deoxy-2'-fluoroadenosine-3'-phosphate
  modified_base 7: mod_base = OTHER; note = 2'-O-methyladenosine-3'-phosphate
  modified_base 8: mod_base = OTHER; note = 2'-deoxy-2'-fluoroadenosine-3'-phosphate
  modified_base 9: mod_base = OTHER; note = 2'-deoxy-2'-fluoroadenosine-3'-phosphate
  modified_base 10: mod_base = OTHER; note = 2'-O-methyluridine-3'-phosphate
  modified_base 11: mod_base = OTHER; note = 2'-O-methylcytidine-3'-phosphate
  modified_base 12: mod_base = OTHER; note = 2'-O-methylguanosine-3'-phosphate
  modified_base 13: mod_base = OTHER; note = 2'-O-methylcytidine-3'-phosphate
  modified_base 14: mod_base = OTHER; note = 2'-deoxy-2'-fluoroadenosine-3'-phosphate
  modified_base 15: mod_base = OTHER; note = 2'-O-methylguanosine-3'-phosphate
  modified_base 16: mod_base = OTHER; note = 2'-deoxy-2'-fluoroadenosine-3'-phosphate
  modified_base 17: mod_base = OTHER; note = 2'-O-methylguanosine-3'-phosphate
  modified_base 18: mod_base = OTHER; note = 2'-O-methylcytidine-3'-phosphate
  modified_base 19: mod_base = OTHER; note = 2'-O-methyluridine-3'-phosphate
  modified_base 20: mod_base = OTHER; note = 2'-O-methyluridine-3'-phosphate
  modified_base 21: mod_base = OTHER; note = 2'-O-methylguanosine-3'-phosphorothioate
  modified_base 22: mod_base = OTHER; note = 2'-O-methyladenosine-3'-phosphorothioate
  modified_base 23: mod_base = OTHER; note = 2'-O-methylguanosine
ttgccaaaatcgcagagcttgag

SEQ ID NO: 158 - RNA, 23 nt, synthetic construct
  source 1..23: mol_type = other RNA
  modified_base 1: mod_base = OTHER; note = 2'-O-methyluridine-3'-phosphorothioate 5'-(E)-Vinylphosphonate
  modified_base 2: mod_base = OTHER; note = 2'-deoxy-2'-fluorocytidine-3'-phosphorothioate
  modified_base 3: mod_base = OTHER; note = 2'-O-methyluridine-3'-phosphate
  modified_base 4: mod_base = OTHER; note = 2'-O-methylguanosine-3'-phosphate
  modified_base 5: mod_base = OTHER; note = 2'-O-methylcytidine-3'-phosphate
  modified_base 6: mod_base = OTHER; note = 2'-deoxy-2'-fluorocytidine-3'-phosphate
  modified_base 7: mod_base = OTHER; note = 2'-O-methyladenosine-3'-phosphate
  modified_base 8: mod_base = OTHER; note = 2'-deoxy-2'-fluoroadenosine-3'-phosphate
  modified_base 9: mod_base = OTHER; note = 2'-deoxy-2'-fluoroadenosine-3'-phosphate
  modified_base 10: mod_base = OTHER; note = 2'-O-methyladenosine-3'-phosphate
  modified_base 11: mod_base = OTHER; note = 2'-O-methyluridine-3'-phosphate
  modified_base 12: mod_base = OTHER; note = 2'-O-methylcytidine-3'-phosphate
  modified_base 13: mod_base = OTHER; note = 2'-O-methylguanosine-3'-phosphate
  modified_base 14: mod_base = OTHER; note = 2'-deoxy-2'-fluorocytidine-3'-phosphate
  modified_base 15: mod_base = OTHER; note = 2'-O-methyladenosine-3'-phosphate
  modified_base 16: mod_base = OTHER; note = 2'-deoxy-2'-fluoroguanosine-3'-phosphate
  modified_base 17: mod_base = OTHER; note = 2'-O-methyladenosine-3'-phosphate
  modified_base 18: mod_base = OTHER; note = 2'-O-methylguanosine-3'-phosphate
  modified_base 19: mod_base = OTHER; note = 2'-O-methylcytidine-3'-phosphate
  modified_base 20: mod_base = OTHER; note = 2'-O-methyluridine-3'-phosphate
  modified_base 21: mod_base = OTHER; note = 2'-O-methyluridine-3'-phosphorothioate
  modified_base 22: mod_base = OTHER; note = 2'-O-methylguanosine-3'-phosphorothioate
  modified_base 23: mod_base = OTHER; note = 2'-O-methyladenosine
tctgccaaaatcgcagagcttga

SEQ ID NO: 159 - RNA, 23 nt, synthetic construct
  source 1..23: mol_type = other RNA
  modified_base 1: mod_base = OTHER; note = 2'-O-methyluridine-3'-phosphorothioate 5'-(E)-Vinylphosphonate
  modified_base 2: mod_base = OTHER; note = 2'-deoxy-2'-fluorocytidine-3'-phosphorothioate
  modified_base 3: mod_base = OTHER; note = 2'-O-methyladenosine-3'-phosphate
  modified_base 4: mod_base = OTHER; note = 2'-O-methylguanosine-3'-phosphate
  modified_base 5: mod_base = OTHER; note = 2'-O-methyladenosine-3'-phosphate
  modified_base 6: mod_base = OTHER; note = 2'-deoxy-2'-fluorouridine-3'-phosphate
  modified_base 7: mod_base = OTHER; note = 2'-O-methylguanosine-3'-phosphate
  modified_base 8: mod_base = OTHER; note = 2'-deoxy-2'-fluorouridine-3'-phosphate
  modified_base 9: mod_base = OTHER; note = 2'-deoxy-2'-fluoroadenosine-3'-phosphate
  modified_base 10: mod_base = OTHER; note = 2'-O-methylguanosine-3'-phosphate
  modified_base 11: mod_base = OTHER; note = 2'-O-methylguanosine-3'-phosphate
  modified_base 12: mod_base = OTHER; note = 2'-O-methyladenosine-3'-phosphate
  modified_base 13: mod_base = OTHER; note = 2'-O-methylcytidine-3'-phosphate
  modified_base 14: mod_base = OTHER; note = 2'-deoxy-2'-fluoroadenosine-3'-phosphate
  modified_base 15: mod_base = OTHER; note = 2'-O-methylcytidine-3'-phosphate
  modified_base 16: mod_base = OTHER; note = 2'-deoxy-2'-fluoroadenosine-3'-phosphate
  modified_base 17: mod_base = OTHER; note = 2'-O-methyluridine-3'-phosphate
  modified_base 18: mod_base = OTHER; note = 2'-O-methyluridine-3'-phosphate
  modified_base 19: mod_base = OTHER; note = 2'-O-methylguanosine-3'-phosphate
  modified_base 20: mod_base = OTHER; note = 2'-O-methylguanosine-3'-phosphate
  modified_base 21: mod_base = OTHER; note = 2'-O-methylguanosine-3'-phosphorothioate
  modified_base 22: mod_base = OTHER; note = 2'-O-methylcytidine-3'-phosphorothioate
  modified_base 23: mod_base = OTHER; note = 2'-O-methyluridine
tcagatgtaggacacattgggct

SEQ ID NO: 160 - RNA, 23 nt, synthetic construct
  source 1..23: mol_type = other RNA
  modified_base 1: mod_base = OTHER; note = 2'-O-methyluridine-3'-phosphorothioate 5'-(E)-Vinylphosphonate
  modified_base 2: mod_base = OTHER; note = 2'-deoxy-2'-fluorocytidine-3'-phosphorothioate
  modified_base 3: mod_base = OTHER; note = 2'-O-methyladenosine-3'-phosphate
  modified_base 4: mod_base = OTHER; note = 2'-O-methyladenosine-3'-phosphate
  modified_base 5: mod_base = OTHER; note = 2'-O-methyladenosine-3'-phosphate
  modified_base 6: mod_base = OTHER; note = 2'-deoxy-2'-fluoroguanosine-3'-phosphate
  modified_base 7: mod_base = OTHER; note = 2'-O-methyladenosine-3'-phosphate
  modified_base 8: mod_base = OTHER; note = 2'-deoxy-2'-fluorouridine-3'-phosphate
  modified_base 9: mod_base = OTHER; note = 2'-deoxy-2'-fluoroguanosine-3'-phosphate
  modified_base 10: mod_base = OTHER; note = 2'-O-methyladenosine-3'-phosphate
  modified_base 11: mod_base = OTHER; note = 2'-O-methylguanosine-3'-phosphate
  modified_base 12: mod_base = OTHER; note = 2'-O-methyluridine-3'-phosphate
  modified_base 13: mod_base = OTHER; note = 2'-O-methyluridine-3'-phosphate
  modified_base 14: mod_base = OTHER; note = 2'-deoxy-2'-fluorocytidine-3'-phosphate
  modified_base 15: mod_base = OTHER; note = 2'-O-methyluridine-3'-phosphate
  modified_base 16: mod_base = OTHER; note = 2'-deoxy-2'-fluoroguanosine-3'-phosphate
  modified_base 17: mod_base = OTHER; note = 2'-O-methylguanosine-3'-phosphate
  modified_base 18: mod_base = OTHER; note = 2'-O-methyladenosine-3'-phosphate
  modified_base 19: mod_base = OTHER; note = 2'-O-methylguanosine-3'-phosphate
  modified_base 20: mod_base = OTHER; note = 2'-O-methylcytidine-3'-phosphate
  modified_base 21: mod_base = OTHER; note = 2'-O-methyladenosine-3'-phosphorothioate
  modified_base 22: mod_base = OTHER; note = 2'-O-methylcytidine-3'-phosphorothioate
  modified_base 23: mod_base = OTHER; note = 2'-O-methylguanosine
tcaaagatgagttctggagcacg

SEQ ID NO: 161 - RNA, 23 nt, synthetic construct
  source 1..23: mol_type = other RNA
  modified_base 1: mod_base = OTHER; note = 2'-O-methyluridine-3'-phosphorothioate 5'-(E)-Vinylphosphonate
  modified_base 2: mod_base = OTHER; note = 2'-deoxy-2'-fluorocytidine-3'-phosphorothioate
  modified_base 3: mod_base = OTHER; note = 2'-O-methylcytidine-3'-phosphate
  modified_base 4: mod_base = OTHER; note = 2'-O-methyladenosine-3'-phosphate
  modified_base 5: mod_base = OTHER; note = 2'-O-methyladenosine-3'-phosphate
  modified_base 6: mod_base = OTHER; note = 2'-deoxy-2'-fluoroadenosine-3'-phosphate
  modified_base 7: mod_base = OTHER; note = 2'-O-methylguanosine-3'-phosphate
  modified_base 8: mod_base = OTHER; note = 2'-deoxy-2'-fluoroadenosine-3'-phosphate
  modified_base 9: mod_base = OTHER; note = 2'-deoxy-2'-fluorouridine-3'-phosphate
  modified_base 10: mod_base = OTHER; note = 2'-O-methylguanosine-3'-phosphate
  modified_base 11: mod_base = OTHER; note = 2'-O-methyladenosine-3'-phosphate
  modified_base 12: mod_base = OTHER; note = 2'-O-methylguanosine-3'-phosphate
  modified_base 13: mod_base = OTHER; note = 2'-O-methyluridine-3'-phosphate
  modified_base 14: mod_base = OTHER; note = 2'-deoxy-2'-fluorouridine-3'-phosphate
  modified_base 15: mod_base = OTHER; note = 2'-O-methylcytidine-3'-phosphate
  modified_base 16: mod_base = OTHER; note = 2'-deoxy-2'-fluorouridine-3'-phosphate
  modified_base 17: mod_base = OTHER; note = 2'-O-methylguanosine-3'-phosphate
  modified_base 18: mod_base = OTHER; note = 2'-O-methylguanosine-3'-phosphate
  modified_base 19: mod_base = OTHER; note = 2'-O-methyladenosine-3'-phosphate
  modified_base 20: mod_base = OTHER; note = 2'-O-methylguanosine-3'-phosphate
  modified_base 21: mod_base = OTHER; note = 2'-O-methylcytidine-3'-phosphorothioate
  modified_base 22: mod_base = OTHER; note = 2'-O-methyladenosine-3'-phosphorothioate
  modified_base 23: mod_base = OTHER; note = 2'-O-methylcytidine
tccaaagatgagttctggagcac

SEQ ID NO: 162 - RNA, 23 nt, synthetic construct
  source 1..23: mol_type = other RNA
  modified_base 1: mod_base = OTHER; note = 2'-O-methyluridine-3'-phosphorothioate 5'-(E)-Vinylphosphonate
  modified_base 2: mod_base = OTHER; note = 2'-deoxy-2'-fluorouridine-3'-phosphorothioate
  modified_base 3: mod_base = OTHER; note = 2'-O-methylcytidine-3'-phosphate
  modified_base 4: mod_base = OTHER; note = 2'-O-methylcytidine-3'-phosphate
  modified_base 5: mod_base = OTHER; note = 2'-O-methyladenosine-3'-phosphate
  modified_base 6: mod_base = OTHER; note = 2'-deoxy-2'-fluoroadenosine-3'-phosphate
  modified_base 7: mod_base = OTHER; note = 2'-O-methyladenosine-3'-phosphate
  modified_base 8: mod_base = OTHER; note = 2'-deoxy-2'-fluoroguanosine-3'-phosphate
  modified_base 9: mod_base = OTHER; note = 2'-deoxy-2'-fluoroadenosine-3'-phosphate
  modified_base 10: mod_base = OTHER; note = 2'-O-methyluridine-3'-phosphate
  modified_base 11: mod_base = OTHER; note = 2'-O-methylguanosine-3'-phosphate
  modified_base 12: mod_base = OTHER; note = 2'-O-methyladenosine-3'-phosphate
  modified_base 13: mod_base = OTHER; note = 2'-O-methylguanosine-3'-phosphate
  modified_base 14: mod_base = OTHER; note = 2'-deoxy-2'-fluorouridine-3'-phosphate
  modified_base 15: mod_base = OTHER; note = 2'-O-methyluridine-3'-phosphate
  modified_base 16: mod_base = OTHER; note = 2'-deoxy-2'-fluorocytidine-3'-phosphate
  modified_base 17: mod_base = OTHER; note = 2'-O-methyluridine-3'-phosphate
  modified_base 18: mod_base = OTHER; note = 2'-O-methylguanosine-3'-phosphate
  modified_base 19: mod_base = OTHER; note = 2'-O-methylguanosine-3'-phosphate
  modified_base 20: mod_base = OTHER; note = 2'-O-methyladenosine-3'-phosphate
  modified_base 21: mod_base = OTHER; note = 2'-O-methylguanosine-3'-phosphorothioate
  modified_base 22: mod_base = OTHER; note = 2'-O-methylcytidine-3'-phosphorothioate
  modified_base 23: mod_base = OTHER; note = 2'-O-methyladenosine
ttccaaagatgagttctggagca

SEQ ID NO: 163 - RNA, 23 nt, synthetic construct
  source 1..23: mol_type = other RNA
  modified_base 1: mod_base = OTHER; note = 2'-O-methyluridine-3'-phosphorothioate 5'-(E)-Vinylphosphonate
  modified_base 2: mod_base = OTHER; note = 2'-deoxy-2'-fluorocytidine-3'-phosphorothioate
  modified_base 3: mod_base = OTHER; note = 2'-O-methyluridine-3'-phosphate
  modified_base 4: mod_base = OTHER; note = 2'-O-methylcytidine-3'-phosphate
  modified_base 5: mod_base = OTHER; note = 2'-O-methylcytidine-3'-phosphate
  modified_base 6: mod_base = OTHER; note = 2'-deoxy-2'-fluoroadenosine-3'-phosphate
  modified_base 7: mod_base = OTHER; note = 2'-O-methyladenosine-3'-phosphate
  modified_base 8: mod_base = OTHER; note = 2'-deoxy-2'-fluoroadenosine-3'-phosphate
  modified_base 9: mod_base = OTHER; note = 2'-deoxy-2'-fluoroguanosine-3'-phosphate
  modified_base 10: mod_base = OTHER; note = 2'-O-methyladenosine-3'-phosphate
  modified_base 11: mod_base = OTHER; note = 2'-O-methyluridine-3'-phosphate
  modified_base 12: mod_base = OTHER; note = 2'-O-methylguanosine-3'-phosphate
  modified_base 13: mod_base = OTHER; note = 2'-O-methyladenosine-3'-phosphate
  modified_base 14: mod_base = OTHER; note = 2'-deoxy-2'-fluoroguanosine-3'-phosphate
  modified_base 15: mod_base = OTHER; note = 2'-O-methyluridine-3'-phosphate
  modified_base 16: mod_base = OTHER; note = 2'-deoxy-2'-fluorouridine-3'-phosphate
  modified_base 17: mod_base = OTHER; note = 2'-O-methylcytidine-3'-phosphate
  modified_base 18: mod_base = OTHER; note = 2'-O-methyluridine-3'-phosphate
  modified_base 19: mod_base = OTHER; note = 2'-O-methylguanosine-3'-phosphate
  modified_base 20: mod_base = OTHER; note = 2'-O-methylguanosine-3'-phosphate
  modified_base 21: mod_base = OTHER; note = 2'-O-methyladenosine-3'-phosphorothioate
  modified_base 22: mod_base = OTHER; note = 2'-O-methylguanosine-3'-phosphorothioate
  modified_base 23: mod_base = OTHER; note = 2'-O-methylcytidine
tctccaaagatgagttctggagc

SEQ ID NO: 164 - RNA, 23 nt, synthetic construct
  source 1..23: mol_type = other RNA
  modified_base 1: mod_base = OTHER; note = 2'-O-methyluridine-3'-phosphorothioate 5'-(E)-Vinylphosphonate
  modified_base 2: mod_base = OTHER; note = 2'-deoxy-2'-fluoroguanosine-3'-phosphorothioate
  modified_base 3: mod_base = OTHER; note = 2'-O-methylcytidine-3'-phosphate
  modified_base 4: mod_base = OTHER; note = 2'-O-methyluridine-3'-phosphate
  modified_base 5: mod_base = OTHER; note = 2'-O-methylcytidine-3'-phosphate
  modified_base 6: mod_base = OTHER; note = 2'-deoxy-2'-fluorocytidine-3'-phosphate
  modified_base 7: mod_base = OTHER; note = 2'-O-methyladenosine-3'-phosphate
  modified_base 8: mod_base = OTHER; note = 2'-deoxy-2'-fluoroadenosine-3'-phosphate
  modified_base 9: mod_base = OTHER; note = 2'-deoxy-2'-fluoroadenosine-3'-phosphate
  modified_base 10: mod_base = OTHER; note = 2'-O-methylguanosine-3'-phosphate
  modified_base 11: mod_base = OTHER; note = 2'-O-methyladenosine-3'-phosphate
  modified_base 12: mod_base = OTHER; note = 2'-O-methyluridine-3'-phosphate
  modified_base 13: mod_base = OTHER; note = 2'-O-methylguanosine-3'-phosphate
  modified_base 14: mod_base = OTHER; note = 2'-deoxy-2'-fluoroadenosine-3'-phosphate
  modified_base 15: mod_base = OTHER; note = 2'-O-methylguanosine-3'-phosphate
  modified_base 16: mod_base = OTHER; note = 2'-deoxy-2'-fluorouridine-3'-phosphate
  modified_base 17: mod_base = OTHER; note = 2'-O-methyluridine-3'-phosphate
  modified_base 18: mod_base = OTHER; note = 2'-O-methylcytidine-3'-phosphate
  modified_base 19: mod_base = OTHER; note = 2'-O-methyluridine-3'-phosphate
  modified_base 20: mod_base = OTHER; note = 2'-O-methylguanosine-3'-phosphate
  modified_base 21: mod_base = OTHER; note = 2'-O-methylguanosine-3'-phosphorothioate
  modified_base 22: mod_base = OTHER; note = 2'-O-methyladenosine-3'-phosphorothioate
  modified_base 23: mod_base = OTHER; note = 2'-O-methylguanosine
tgctccaaagatgagttctggag

SEQ ID NO: 165 - RNA, 23 nt, synthetic construct
  source 1..23: mol_type = other RNA
  modified_base 1: mod_base = OTHER; note = 2'-O-methyluridine-3'-phosphorothioate 5'-(E)-Vinylphosphonate
  modified_base 2: mod_base = OTHER; note = 2'-deoxy-2'-fluoroadenosine-3'-phosphorothioate
  modified_base 3: mod_base = OTHER; note = 2'-O-methyluridine-3'-phosphate
  modified_base 4: mod_base = OTHER; note = 2'-O-methyladenosine-3'-phosphate
  modified_base 5: mod_base = OTHER; note = 2'-O-methylguanosine-3'-phosphate
  modified_base 6: mod_base = OTHER; note = 2'-deoxy-2'-fluorouridine-3'-phosphate
  modified_base 7: mod_base = OTHER; note = 2'-O-methyluridine-3'-phosphate
  modified_base 8: mod_base = OTHER; note = 2'-deoxy-2'-fluoroadenosine-3'-phosphate
  modified_base 9: mod_base = OTHER; note = 2'-deoxy-2'-fluoroguanosine-3'-phosphate
  modified_base 10: mod_base = OTHER; note = 2'-O-methylguanosine-3'-phosphate
  modified_base 11: mod_base = OTHER; note = 2'-O-methylguanosine-3'-phosphate
  modified_base 12: mod_base = OTHER; note = 2'-O-methyluridine-3'-phosphate
  modified_base 13: mod_base = OTHER; note = 2'-O-methyluridine-3'-phosphate
  modified_base 14: mod_base = OTHER; note = 2'-deoxy-2'-fluorocytidine-3'-phosphate
  modified_base 15: mod_base = OTHER; note = 2'-O-methyladenosine-3'-phosphate
  modified_base 16: mod_base = OTHER; note = 2'-deoxy-2'-fluorouridine-3'-phosphate
  modified_base 17: mod_base = OTHER; note = 2'-O-methylcytidine-3'-phosphate
  modified_base 18: mod_base = OTHER; note = 2'-O-methyluridine-3'-phosphate
  modified_base 19: mod_base = OTHER; note = 2'-O-methylcytidine-3'-phosphate
  modified_base 20: mod_base = OTHER; note = 2'-O-methyluridine-3'-phosphate
  modified_base 21: mod_base = OTHER; note = 2'-O-methylcytidine-3'-phosphorothioate
  modified_base 22: mod_base = OTHER; note = 2'-O-methylguanosine-3'-phosphorothioate
  modified_base 23: mod_base = OTHER; note = 2'-O-methylguanosine
tatagttagggttcatctctcgg

SEQ ID NO: 166 - RNA, 23 nt, synthetic construct
  source 1..23: mol_type = other RNA
  modified_base 1: mod_base = OTHER; note = 2'-O-methyluridine-3'-phosphorothioate 5'-(E)-Vinylphosphonate
  modified_base 2: mod_base = OTHER; note = 2'-deoxy-2'-fluoroadenosine-3'-phosphorothioate
  modified_base 3: mod_base = OTHER; note = 2'-O-methyladenosine-3'-phosphate
  modified_base 4: mod_base = OTHER; note = 2'-O-methylguanosine-3'-phosphate
  modified_base 5: mod_base = OTHER; note = 2'-O-methyladenosine-3'-phosphate
  modified_base 6: mod_base = OTHER; note = 2'-deoxy-2'-fluorouridine-3'-phosphate
  modified_base 7: mod_base = OTHER; note = 2'-O-methyluridine-3'-phosphate
  modified_base 8: mod_base = OTHER; note = 2'-deoxy-2'-fluorouridine-3'-phosphate
  modified_base 9: mod_base = OTHER; note = 2'-deoxy-2'-fluoroguanosine-3'-phosphate
  modified_base 10: mod_base = OTHER; note = 2'-O-methyladenosine-3'-phosphate
  modified_base 11: mod_base = OTHER; note = 2'-O-methyladenosine-3'-phosphate
  modified_base 12: mod_base = OTHER; note = 2'-O-methylcytidine-3'-phosphate
  modified_base 13: mod_base = OTHER; note = 2'-O-methyladenosine-3'-phosphate
  modified_base 14: mod_base = OTHER; note = 2'-deoxy-2'-fluorocytidine-3'-phosphate
  modified_base 15: mod_base = OTHER; note = 2'-O-methylcytidine-3'-phosphate
  modified_base 16: mod_base = OTHER; note = 2'-deoxy-2'-fluorouridine-3'-phosphate
  modified_base 17: mod_base = OTHER; note = 2'-O-methyluridine-3'-phosphate
  modified_base 18: mod_base = OTHER; note = 2'-O-methyluridine-3'-phosphate
  modified_base 19: mod_base = OTHER; note = 2'-O-methylguanosine-3'-phosphate
  modified_base 20: mod_base = OTHER; note = 2'-O-methyluridine-3'-phosphate
  modified_base 21: mod_base = OTHER; note = 2'-O-methylcytidine-3'-phosphorothioate
  modified_base 22: mod_base = OTHER; note = 2'-O-methylcytidine-3'-phosphorothioate
  modified_base 23: mod_base = OTHER; note = 2'-O-methyladenosine
taagatttgaacacctttgtcca

SEQ ID NO: 167 - RNA, 23 nt, synthetic construct
  source 1..23: mol_type = other RNA
  modified_base 1: mod_base = OTHER; note = 2'-O-methyluridine-3'-phosphorothioate 5'-(E)-Vinylphosphonate
  modified_base 2: mod_base = OTHER; note = 2'-deoxy-2'-fluorouridine-3'-phosphorothioate
  modified_base 3: mod_base = OTHER; note = 2'-O-methylcytidine-3'-phosphate
  modified_base 4: mod_base = OTHER; note = 2'-O-methyladenosine-3'-phosphate
  modified_base 5: mod_base = OTHER; note = 2'-O-methyluridine-3'-phosphate
  modified_base 6: mod_base = OTHER; note = 2'-deoxy-2'-fluorocytidine-3'-phosphate
  modified_base 7: mod_base = OTHER; note = 2'-O-methylguanosine-3'-phosphate
  modified_base 8: mod_base = OTHER; note = 2'-deoxy-2'-fluoroadenosine-3'-phosphate
  modified_base 9: mod_base = OTHER; note = 2'-deoxy-2'-fluoroadenosine-3'-phosphate
  modified_base 10: mod_base = OTHER; note = 2'-O-methylguanosine-3'-phosphate
  modified_base 11: mod_base = OTHER; note = 2'-O-methyladenosine-3'-phosphate
  modified_base 12: mod_base = OTHER; note = 2'-O-methyladenosine-3'-phosphate
  modified_base 13: mod_base = OTHER; note = 2'-O-methylguanosine-3'-phosphate
  modified_base 14: mod_base = OTHER; note = 2'-deoxy-2'-fluorocytidine-3'-phosphate
  modified_base 15: mod_base = OTHER; note = 2'-O-methyluridine-3'-phosphate
  modified_base 16: mod_base = OTHER; note = 2'-deoxy-2'-fluoroguanosine-3'-phosphate
  modified_base 17: mod_base = OTHER; note = 2'-O-methyluridine-3'-phosphate
  modified_base 18: mod_base = OTHER; note = 2'-O-methylguanosine-3'-phosphate
  modified_base 19: mod_base = OTHER; note = 2'-O-methylguanosine-3'-phosphate
  modified_base 20: mod_base = OTHER; note = 2'-O-methylguanosine-3'-phosphate
  modified_base 21: mod_base = OTHER; note = 2'-O-methylcytidine-3'-phosphorothioate
  modified_base 22: mod_base = OTHER; note = 2'-O-methyladenosine-3'-phosphorothioate
  modified_base 23: mod_base = OTHER; note = 2'-O-methylcytidine
ttcatcgaagaagctgtgggcac

SEQ ID NO: 168 - RNA, 23 nt, synthetic construct
  source 1..23: mol_type = other RNA
  modified_base 1: mod_base = OTHER; note = 2'-O-methyluridine-3'-phosphorothioate 5'-(E)-Vinylphosphonate
  modified_base 2: mod_base = OTHER; note = 2'-deoxy-2'-fluorocytidine-3'-phosphorothioate
  modified_base 3: mod_base = OTHER; note = 2'-O-methylguanosine-3'-phosphate
  modified_base 4: mod_base = OTHER; note = 2'-O-methylcytidine-3'-phosphate
  modified_base 5: mod_base = OTHER; note = 2'-O-methyladenosine-3'-phosphate
  modified_base 6: mod_base = OTHER; note = 2'-deoxy-2'-fluoroguanosine-3'-phosphate
  modified_base 7: mod_base = OTHER; note = 2'-O-methyluridine-3'-phosphate
  modified_base 8: mod_base = OTHER; note = 2'-deoxy-2'-fluorouridine-3'-phosphate
  modified_base 9: mod_base = OTHER; note = 2'-deoxy-2'-fluorocytidine-3'-phosphate
  modified_base 10: mod_base = OTHER; note = 2'-O-methyladenosine-3'-phosphate
  modified_base 11: mod_base = OTHER; note = 2'-O-methyluridine-3'-phosphate
  modified_base 12: mod_base = OTHER; note = 2'-O-methylcytidine-3'-phosphate
  modified_base 13: mod_base = OTHER; note = 2'-O-methylguanosine-3'-phosphate
  modified_base 14: mod_base = OTHER; note = 2'-deoxy-2'-fluoroadenosine-3'-phosphate
  modified_base 15: mod_base = OTHER; note = 2'-O-methyladenosine-3'-phosphate
  modified_base 16: mod_base = OTHER; note = 2'-deoxy-2'-fluoroguanosine-3'-phosphate
  modified_base 17: mod_base = OTHER; note = 2'-O-methyladenosine-3'-phosphate
  modified_base 18: mod_base = OTHER; note = 2'-O-methyladenosine-3'-phosphate
  modified_base 19: mod_base = OTHER; note = 2'-O-methylguanosine-3'-phosphate
  modified_base 20: mod_base = OTHER; note = 2'-O-methylcytidine-3'-phosphate
  modified_base 21: mod_base = OTHER; note = 2'-O-methyluridine-3'-phosphorothioate
  modified_base 22: mod_base = OTHER; note = 2'-O-methylguanosine-3'-phosphorothioate
  modified_base 23: mod_base = OTHER; note = 2'-O-methyluridine
tcgcagttcatcgaagaagctgt

SEQ ID NO: 169 - RNA, 23 nt, synthetic construct
  source 1..23: mol_type = other RNA
  modified_base 1: mod_base = OTHER; note = 2'-O-methyluridine-3'-phosphorothioate 5'-(E)-Vinylphosphonate
  modified_base 2: mod_base = OTHER; note = 2'-deoxy-2'-fluoroguanosine-3'-phosphorothioate
  modified_base 3: mod_base = OTHER; note = 2'-O-methyluridine-3'-phosphate
  modified_base 4: mod_base = OTHER; note = 2'-O-methyluridine-3'-phosphate
  modified_base 5: mod_base = OTHER; note = 2'-O-methyladenosine-3'-phosphate
  modified_base 6: mod_base = OTHER; note = 2'-deoxy-2'-fluoroadenosine-3'-phosphate
  modified_base 7: mod_base = OTHER; note = 2'-O-methyladenosine-3'-phosphate
  modified_base 8: mod_base = OTHER; note = 2'-deoxy-2'-fluoroguanosine-3'-phosphate
  modified_base 9: mod_base = OTHER; note = 2'-deoxy-2'-fluorocytidine-3'-phosphate
  modified_base 10: mod_base = OTHER; note = 2'-O-methyluridine-3'-phosphate
  modified_base 11: mod_base = OTHER; note = 2'-O-methyluridine-3'-phosphate
  modified_base 12: mod_base = OTHER; note = 2'-O-methylguanosine-3'-phosphate
  modified_base 13: mod_base = OTHER; note = 2'-O-methyluridine-3'-phosphate
  modified_base 14: mod_base = OTHER; note = 2'-deoxy-2'-fluoroguanosine-3'-phosphate
  modified_base 15: mod_base = OTHER; note = 2'-O-methyladenosine-3'-phosphate
  modified_base 16: mod_base = OTHER; note = 2'-deoxy-2'-fluoroguanosine-3'-phosphate
  modified_base 17: mod_base = OTHER; note = 2'-O-methylguanosine-3'-phosphate
  modified_base 18: mod_base = OTHER; note = 2'-O-methyladenosine-3'-phosphate
  modified_base 19: mod_base = OTHER; note = 2'-O-methyluridine-3'-phosphate
  modified_base 20: mod_base = OTHER; note = 2'-O-methylguanosine-3'-phosphate
  modified_base 21: mod_base = OTHER; note = 2'-O-methylguanosine-3'-phosphorothioate
  modified_base 22: mod_base = OTHER; note = 2'-O-methylguanosine-3'-phosphorothioate
  modified_base 23: mod_base = OTHER; note = 2'-O-methyluridine
tgttaaagcttgtgaggatgggt

SEQ ID NO: 170 - RNA, 23 nt, synthetic construct
  source 1..23: mol_type = other RNA
  modified_base 1: mod_base = OTHER; note = 2'-O-methyluridine-3'-phosphorothioate 5'-(E)-Vinylphosphonate
  modified_base 2: mod_base = OTHER; note = 2'-deoxy-2'-fluoroadenosine-3'-phosphorothioate
  modified_base 3: mod_base = OTHER; note = 2'-O-methylguanosine-3'-phosphate
  modified_base 4: mod_base = OTHER; note = 2'-O-methyluridine-3'-phosphate
  modified_base 5: mod_base = OTHER; note = 2'-O-methyluridine-3'-phosphate
  modified_base 6: mod_base = OTHER; note = 2'-deoxy-2'-fluoroadenosine-3'-phosphate
  modified_base 7: mod_base = OTHER; note = 2'-O-methyladenosine-3'-phosphate
  modified_base 8: mod_base = OTHER; note = 2'-deoxy-2'-fluoroadenosine-3'-phosphate
  modified_base 9: mod_base = OTHER; note = 2'-deoxy-2'-fluoroguanosine-3'-phosphate
  modified_base 10: mod_base = OTHER; note = 2'-O-methylcytidine-3'-phosphate
  modified_base 11: mod_base = OTHER; note = 2'-O-methyluridine-3'-phosphate
  modified_base 12: mod_base = OTHER; note = 2'-O-methyluridine-3'-phosphate
  modified_base 13: mod_base = OTHER; note = 2'-O-methylguanosine-3'-phosphate
  modified_base 14: mod_base = OTHER; note = 2'-deoxy-2'-fluorouridine-3'-phosphate
  modified_base 15: mod_base = OTHER; note = 2'-O-methylguanosine-3'-phosphate
  modified_base 16: mod_base = OTHER; note = 2'-deoxy-2'-fluoroadenosine-3'-phosphate
  modified_base 17: mod_base = OTHER; note = 2'-O-methylguanosine-3'-phosphate
  modified_base 18: mod_base = OTHER; note = 2'-O-methylguanosine-3'-phosphate
  modified_base 19: mod_base = OTHER; note = 2'-O-methyladenosine-3'-phosphate
  modified_base 20: mod_base = OTHER; note = 2'-O-methyluridine-3'-phosphate
  modified_base 21: mod_base = OTHER; note = 2'-O-methylguanosine-3'-phosphorothioate
  modified_base 22: mod_base = OTHER; note = 2'-O-methylguanosine-3'-phosphorothioate
  modified_base 23: mod_base = OTHER; note = 2'-O-methylguanosine
tagttaaagcttgtgaggatggg

SEQ ID NO: 171 - RNA, 23 nt, synthetic construct
  source 1..23: mol_type = other RNA
  modified_base 1: mod_base = OTHER; note = 2'-O-methyluridine-3'-phosphorothioate 5'-(E)-Vinylphosphonate
  modified_base 2: mod_base = OTHER; note = 2'-deoxy-2'-fluorocytidine-3'-phosphorothioate
  modified_base 3: mod_base = OTHER; note = 2'-O-methyladenosine-3'-phosphate
  modified_base 4: mod_base = OTHER; note = 2'-O-methylguanosine-3'-phosphate
  modified_base 5: mod_base = OTHER; note = 2'-O-methyluridine-3'-phosphate
  modified_base 6: mod_base = OTHER; note = 2'-deoxy-2'-fluorouridine-3'-phosphate
  modified_base 7: mod_base = OTHER; note = 2'-O-methyladenosine-3'-phosphate
  modified_base 8: mod_base = OTHER; note = 2'-deoxy-2'-fluoroadenosine-3'-phosphate
  modified_base 9: mod_base = OTHER; note = 2'-deoxy-2'-fluoroadenosine-3'-phosphate
  modified_base 10: mod_base = OTHER; note = 2'-O-methylguanosine-3'-phosphate
  modified_base 11: mod_base = OTHER; note = 2'-O-methylcytidine-3'-phosphate
  modified_base 12: mod_base = OTHER; note = 2'-O-methyluridine-3'-phosphate
  modified_base 13: mod_base = OTHER; note = 2'-O-methyluridine-3'-phosphate
  modified_base 14: mod_base = OTHER; note = 2'-deoxy-2'-fluoroguanosine-3'-phosphate
  modified_base 15: mod_base = OTHER; note = 2'-O-methyluridine-3'-phosphate
  modified_base 16: mod_base = OTHER; note = 2'-deoxy-2'-fluoroguanosine-3'-phosphate
  modified_base 17: mod_base = OTHER; note = 2'-O-methyladenosine-3'-phosphate
  modified_base 18: mod_base = OTHER; note = 2'-O-methylguanosine-3'-phosphate
  modified_base 19: mod_base = OTHER; note = 2'-O-methylguanosine-3'-phosphate
  modified_base 20: mod_base = OTHER; note = 2'-O-methyladenosine-3'-phosphate
  modified_base 21: mod_base = OTHER; note = 2'-O-methyluridine-3'-phosphorothioate
  modified_base 22: mod_base = OTHER; note = 2'-O-methylguanosine-3'-phosphorothioate
  modified_base 23: mod_base = OTHER; note = 2'-O-methylguanosine
tcagttaaagcttgtgaggatgg

SEQ ID NO: 172 - RNA, 23 nt, synthetic construct
  source 1..23: mol_type = other RNA
  modified_base 1: mod_base = OTHER; note = 2'-O-methyluridine-3'-phosphorothioate 5'-(E)-Vinylphosphonate
  modified_base 2: mod_base = OTHER; note = 2'-deoxy-2'-fluorocytidine-3'-phosphorothioate
  modified_base 3: mod_base = OTHER; note = 2'-O-methyladenosine-3'-phosphate
  modified_base 4: mod_base = OTHER; note = 2'-O-methyladenosine-3'-phosphate
  modified_base 5: mod_base = OTHER; note = 2'-O-methyladenosine-3'-phosphate
  modified_base 6: mod_base = OTHER; note = 2'-deoxy-2'-fluorocytidine-3'-phosphate
  modified_base 7: mod_base = OTHER; note = 2'-O-methyladenosine-3'-phosphate
  modified_base 8: mod_base = OTHER; note = 2'-deoxy-2'-fluoroguanosine-3'-phosphate
  modified_base 9: mod_base = OTHER; note = 2'-deoxy-2'-fluorouridine-3'-phosphate
  modified_base 10: mod_base = OTHER; note = 2'-O-methyluridine-3'-phosphate
  modified_base 11: mod_base = OTHER; note = 2'-O-methyladenosine-3'-phosphate
  modified_base 12: mod_base = OTHER; note = 2'-O-methyladenosine-3'-phosphate
  modified_base 13: mod_base = OTHER; note = 2'-O-methyladenosine-3'-phosphate
  modified_base 14: mod_base = OTHER; note = 2'-deoxy-2'-fluoroadenosine-3'-phosphate
  modified_base 15: mod_base = OTHER; note = 2'-O-methyluridine-3'-phosphate
  modified_base 16: mod_base = OTHER; note = 2'-deoxy-2'-fluorocytidine-3'-phosphate
  modified_base 17: mod_base = OTHER; note = 2'-O-methylcytidine-3'-phosphate
  modified_base 18: mod_base = OTHER; note = 2'-O-methyluridine-3'-phosphate
  modified_base 19: mod_base = OTHER; note = 2'-O-methylcytidine-3'-phosphate
  modified_base 20: mod_base = OTHER; note = 2'-O-methyluridine-3'-phosphate
  modified_base 21: mod_base = OTHER; note = 2'-O-methyluridine-3'-phosphorothioate
  modified_base 22: mod_base = OTHER; note = 2'-O-methyluridine-3'-phosphorothioate
  modified_base 23: mod_base = OTHER; note = 2'-O-methyladenosine
tcaaacagttaaaatcctcttta

SEQ ID NO: 173 - RNA, 23 nt, synthetic construct
  source 1..23: mol_type = other RNA
  modified_base 1: mod_base = OTHER; note = 2'-O-methyluridine-3'-phosphorothioate 5'-(E)-Vinylphosphonate
  modified_base 2: mod_base = OTHER; note = 2'-deoxy-2'-fluoroadenosine-3'-phosphorothioate
  modified_base 3: mod_base = OTHER; note = 2'-O-methylcytidine-3'-phosphate
  modified_base 4: mod_base = OTHER; note = 2'-O-methyladenosine-3'-phosphate
  modified_base 5: mod_base = OTHER; note = 2'-O-methyladenosine-3'-phosphate
  modified_base 6: mod_base = OTHER; note = 2'-deoxy-2'-fluoroadenosine-3'-phosphate
  modified_base 7: mod_base = OTHER; note = 2'-O-methylcytidine-3'-phosphate
  modified_base 8: mod_base = OTHER; note = 2'-deoxy-2'-fluoroadenosine-3'-phosphate
  modified_base 9: mod_base = OTHER; note = 2'-deoxy-2'-fluoroguanosine-3'-phosphate
  modified_base 10: mod_base = OTHER; note = 2'-O-methyluridine-3'-phosphate
  modified_base 11: mod_base = OTHER; note = 2'-O-methyluridine-3'-phosphate
  modified_base 12: mod_base = OTHER; note = 2'-O-methyladenosine-3'-phosphate
  modified_base 13: mod_base = OTHER; note = 2'-O-methyladenosine-3'-phosphate
  modified_base 14: mod_base = OTHER; note = 2'-deoxy-2'-fluoroadenosine-3'-phosphate
  modified_base 15: mod_base = OTHER; note = 2'-O-methyladenosine-3'-phosphate
  modified_base 16: mod_base = OTHER; note = 2'-deoxy-2'-fluorouridine-3'-phosphate
  modified_base 17: mod_base = OTHER; note = 2'-O-methylcytidine-3'-phosphate
  modified_base 18: mod_base = OTHER; note = 2'-O-methylcytidine-3'-phosphate
  modified_base 19: mod_base = OTHER; note = 2'-O-methyluridine-3'-phosphate
  modified_base 20: mod_base = OTHER; note = 2'-O-methylcytidine-3'-phosphate
  modified_base 21: mod_base = OTHER; note = 2'-O-methyluridine-3'-phosphorothioate
  modified_base 22: mod_base = OTHER; note = 2'-O-methyluridine-3'-phosphorothioate
  modified_base 23: mod_base = OTHER; note = 2'-O-methyluridine
tacaaacagttaaaatcctcttt

SEQ ID NO: 174 - RNA, 23 nt, synthetic construct
  source 1..23: mol_type = other RNA
  modified_base 1: mod_base = OTHER; note = 2'-O-methyluridine-3'-phosphorothioate 5'-(E)-Vinylphosphonate
  modified_base 2: mod_base = OTHER; note = 2'-deoxy-2'-fluorouridine-3'-phosphorothioate
  modified_base 3: mod_base = OTHER; note = 2'-O-methyladenosine-3'-phosphate
  modified_base 4: mod_base = OTHER; note = 2'-O-methylcytidine-3'-phosphate
  modified_base 5: mod_base = OTHER; note = 2'-O-methyladenosine-3'-phosphate
  modified_base 6: mod_base = OTHER; note = 2'-deoxy-2'-fluoroadenosine-3'-phosphate
  modified_base 7: mod_base = OTHER; note = 2'-O-methyladenosine-3'-phosphate
  modified_base 8: mod_base = OTHER; note = 2'-deoxy-2'-fluorocytidine-3'-phosphate
  modified_base 9: mod_base = OTHER; note = 2'-deoxy-2'-fluoroadenosine-3'-phosphate
  modified_base 10: mod_base = OTHER; note = 2'-O-methylguanosine-3'-phosphate
  modified_base 11: mod_base = OTHER; note = 2'-O-methyluridine-3'-phosphate
  modified_base 12: mod_base = OTHER; note = 2'-O-methyluridine-3'-phosphate
  modified_base 13: mod_base = OTHER; note = 2'-O-methyladenosine-3'-phosphate
  modified_base 14: mod_base = OTHER; note = 2'-deoxy-2'-fluoroadenosine-3'-phosphate
  modified_base 15: mod_base = OTHER; note = 2'-O-methyladenosine-3'-phosphate
  modified_base 16: mod_base = OTHER; note = 2'-deoxy-2'-fluoroadenosine-3'-phosphate
  modified_base 17: mod_base = OTHER; note = 2'-O-methyluridine-3'-phosphate
  modified_base 18: mod_base = OTHER; note = 2'-O-methylcytidine-3'-phosphate
  modified_base 19: mod_base = OTHER; note = 2'-O-methylcytidine-3'-phosphate
  modified_base 20: mod_base = OTHER; note = 2'-O-methyluridine-3'-phosphate
  modified_base 21: mod_base = OTHER; note = 2'-O-methylcytidine-3'-phosphorothioate
  modified_base 22: mod_base = OTHER; note = 2'-O-methyluridine-3'-phosphorothioate
  modified_base 23: mod_base = OTHER; note = 2'-O-methyluridine
ttacaaacagttaaaatcctctt

SEQ ID NO: 175 - RNA, 23 nt, synthetic construct
  source 1..23: mol_type = other RNA
  modified_base 1: mod_base = OTHER; note = 2'-O-methyluridine-3'-phosphorothioate 5'-(E)-Vinylphosphonate
  modified_base 2: mod_base = OTHER; note = 2'-deoxy-2'-fluorouridine-3'-phosphorothioate
  modified_base 3: mod_base = OTHER; note = 2'-O-methyladenosine-3'-phosphate
  modified_base 4: mod_base = OTHER; note = 2'-O-methyladenosine-3'-phosphate
  modified_base 5: mod_base = OTHER; note = 2'-O-methylcytidine-3'-phosphate
  modified_base 6: mod_base = OTHER; note = 2'-deoxy-2'-fluoroadenosine-3'-phosphate
  modified_base 7: mod_base = OTHER; note = 2'-O-methyladenosine-3'-phosphate
  modified_base 8: mod_base = OTHER; note = 2'-deoxy-2'-fluorouridine-3'-phosphate
  modified_base 9: mod_base = OTHER; note = 2'-deoxy-2'-fluorocytidine-3'-phosphate
  modified_base 10: mod_base = OTHER; note = 2'-O-methyluridine-3'-phosphate
  modified_base 11: mod_base = OTHER; note = 2'-O-methyladenosine-3'-phosphate
  modified_base 12: mod_base = OTHER; note = 2'-O-methyluridine-3'-phosphate
  modified_base 13: mod_base = OTHER; note = 2'-O-methyluridine-3'-phosphate
  modified_base 14: mod_base = OTHER; note = 2'-deoxy-2'-fluorouridine-3'-phosphate
  modified_base 15: mod_base = OTHER; note = 2'-O-methyladenosine-3'-phosphate
  modified_base 16: mod_base = OTHER; note = 2'-deoxy-2'-fluorocytidine-3'-phosphate
  modified_base 17: mod_base = OTHER; note = 2'-O-methyladenosine-3'-phosphate
  modified_base 18: mod_base = OTHER; note = 2'-O-methylcytidine-3'-phosphate
  modified_base 19: mod_base = OTHER; note = 2'-O-methylcytidine-3'-phosphate
  modified_base 20: mod_base = OTHER; note = 2'-O-methylcytidine-3'-phosphate
  modified_base 21: mod_base = OTHER; note = 2'-O-methyladenosine-3'-phosphorothioate
  modified_base 22: mod_base = OTHER; note = 2'-O-methylguanosine-3'-phosphorothioate
  modified_base 23: mod_base = OTHER; note = 2'-O-methylguanosine
ttaacaatctatttacacccagg

SEQ ID NO: 176 - RNA, 23 nt, synthetic construct
  source 1..23: mol_type = other RNA
  modified_base 1: mod_base = OTHER; note = 2'-O-methyluridine-3'-phosphorothioate 5'-(E)-Vinylphosphonate
  modified_base 2: mod_base = OTHER; note = 2'-deoxy-2'-fluoroadenosine-3'-phosphorothioate
  modified_base 3: mod_base = OTHER; note = 2'-O-methyluridine-3'-phosphate
  modified_base 4: mod_base = OTHER; note = 2'-O-methyladenosine-3'-phosphate
  modified_base 5: mod_base = OTHER; note = 2'-O-methyladenosine-3'-phosphate
  modified_base 6: mod_base = OTHER; note = 2'-deoxy-2'-fluorocytidine-3'-phosphate
  modified_base 7: mod_base = OTHER; note = 2'-O-methyladenosine-3'-phosphate
  modified_base 8: mod_base = OTHER; note = 2'-deoxy-2'-fluoroadenosine-3'-phosphate
  modified_base 9: mod_base = OTHER; note = 2'-deoxy-2'-fluorouridine-3'-phosphate
  modified_base 10: mod_base = OTHER; note = 2'-O-methylcytidine-3'-phosphate
  modified_base 11: mod_base = OTHER; note = 2'-O-methyluridine-3'-phosphate
  modified_base 12: mod_base = OTHER; note = 2'-O-methyladenosine-3'-phosphate
  modified_base 13: mod_base = OTHER; note = 2'-O-methyluridine-3'-phosphate
  modified_base 14: mod_base = OTHER; note = 2'-deoxy-2'-fluorouridine-3'-phosphate
  modified_base 15: mod_base = OTHER; note = 2'-O-methyluridine-3'-phosphate
  modified_base 16: mod_base = OTHER; note = 2'-deoxy-2'-fluoroadenosine-3'-phosphate
  modified_base 17: mod_base = OTHER; note = 2'-O-methylcytidine-3'-phosphate
  modified_base 18: mod_base = OTHER; note = 2'-O-methyladenosine-3'-phosphate
  modified_base 19: mod_base = OTHER; note = 2'-O-methylcytidine-3'-phosphate
  modified_base 20: mod_base = OTHER; note = 2'-O-methylcytidine-3'-phosphate
  modified_base 21: mod_base = OTHER; note = 2'-O-methylcytidine-3'-phosphorothioate
  modified_base 22: mod_base = OTHER; note = 2'-O-methyladenosine-3'-phosphorothioate
  modified_base 23: mod_base = OTHER; note = 2'-O-methylguanosine
tataacaatctatttacacccag

SEQ ID NO: 177 - RNA, 23 nt, synthetic construct
  source 1..23: mol_type = other RNA
  modified_base 1: mod_base = OTHER; note = 2'-O-methyluridine-3'-phosphorothioate 5'-(E)-Vinylphosphonate
  modified_base 2: mod_base = OTHER; note = 2'-deoxy-2'-fluorocytidine-3'-phosphorothioate
  modified_base 3: mod_base = OTHER; note = 2'-O-methyladenosine-3'-phosphate
  modified_base 4: mod_base = OTHER; note = 2'-O-methyladenosine-3'-phosphate
  modified_base 5: mod_base = OTHER; note = 2'-O-methylguanosine-3'-phosphate
  modified_base 6: mod_base = OTHER; note = 2'-deoxy-2'-fluorouridine-3'-phosphate
  modified_base 7: mod_base = OTHER; note = 2'-O-methyluridine-3'-phosphate
  modified_base 8: mod_base = OTHER; note = 2'-deoxy-2'-fluoroguanosine-3'-phosphate
  modified_base 9: mod_base = OTHER; note = 2'-deoxy-2'-fluoroadenosine-3'-phosphate
  modified_base 10: mod_base = OTHER; note = 2'-O-methyladenosine-3'-phosphate
  modified_base 11: mod_base = OTHER; note = 2'-O-methyluridine-3'-phosphate
  modified_base 12: mod_base = OTHER; note = 2'-O-methylguanosine-3'-phosphate
  modified_base 13: mod_base = OTHER; note = 2'-O-methylguanosine-3'-phosphate
  modified_base 14: mod_base = OTHER; note = 2'-deoxy-2'-fluorouridine-3'-phosphate
  modified_base 15: mod_base = OTHER; note = 2'-O-methylguanosine-3'-phosphate
  modified_base 16: mod_base = OTHER; note = 2'-deoxy-2'-fluorouridine-3'-phosphate
  modified_base 17: mod_base = OTHER; note = 2'-O-methylguanosine-3'-phosphate
  modified_base 18: mod_base = OTHER; note = 2'-O-methyladenosine-3'-phosphate
  modified_base 19: mod_base = OTHER; note = 2'-O-methyladenosine-3'-phosphate
  modified_base 20: mod_base = OTHER; note = 2'-O-methyluridine-3'-phosphate
  modified_base 21: mod_base = OTHER; note = 2'-O-methyluridine-3'-phosphorothioate
  modified_base 22: mod_base = OTHER; note = 2'-O-methylguanosine-3'-phosphorothioate
  modified_base 23: mod_base = OTHER; note = 2'-O-methyladenosine
tcaagttgaatggtgtgaattga

SEQ ID NO: 178 - RNA, 23 nt, synthetic construct
  source 1..23: mol_type = other RNA
  modified_base 1: mod_base = OTHER; note = 2'-O-methyluridine-3'-phosphorothioate 5'-(E)-Vinylphosphonate
  modified_base 2: mod_base = OTHER; note = 2'-deoxy-2'-fluoroguanosine-3'-phosphorothioate
  modified_base 3: mod_base = OTHER; note = 2'-O-methyladenosine-3'-phosphate
  modified_base 4: mod_base = OTHER; note = 2'-O-methyladenosine-3'-phosphate
  modified_base 5: mod_base = OTHER; note = 2'-O-methyladenosine-3'-phosphate
  modified_base 6: mod_base = OTHER; note = 2'-deoxy-2'-fluorocytidine-3'-phosphate
  modified_base 7: mod_base = OTHER; note = 2'-O-methyluridine-3'-phosphate
  modified_base 8: mod_base = OTHER; note = 2'-deoxy-2'-fluoroadenosine-3'-phosphate
  modified_base 9: mod_base = OTHER; note = 2'-deoxy-2'-fluoroadenosine-3'-phosphate
  modified_base 10: mod_base = OTHER; note = 2'-O-methylguanosine-3'-phosphate
  modified_base 11: mod_base = OTHER; note = 2'-O-methyladenosine-3'-phosphate
  modified_base 12: mod_base = OTHER; note = 2'-O-methylcytidine-3'-phosphate
  modified_base 13: mod_base = OTHER; note = 2'-O-methyladenosine-3'-phosphate
  modified_base 14: mod_base = OTHER; note = 2'-deoxy-2'-fluorocytidine-3'-phosphate
  modified_base 15: mod_base = OTHER; note = 2'-O-methylcytidine-3'-phosphate
  modified_base 16: mod_base = OTHER; note = 2'-deoxy-2'-fluoroadenosine-3'-phosphate
  modified_base 17: mod_base = OTHER; note = 2'-O-methylguanosine-3'-phosphate
  modified_base 18: mod_base = OTHER; note = 2'-O-methylguanosine-3'-phosphate
  modified_base 19: mod_base = OTHER; note = 2'-O-methylguanosine-3'-phosphate
  modified_base 20: mod_base = OTHER; note = 2'-O-methyladenosine-3'-phosphate
  modified_base 21: mod_base = OTHER; note = 2'-O-methylcytidine-3'-phosphorothioate
  modified_base 22: mod_base = OTHER; note = 2'-O-methyluridine-3'-phosphorothioate
  modified_base 23: mod_base = OTHER; note = 2'-O-methylcytidine
tgaaactaagacaccagggactc

SEQ ID NO: 179 - RNA, 23 nt, synthetic construct
  source 1..23: mol_type = other RNA
  modified_base 1: mod_base = OTHER; note = 2'-O-methyluridine-3'-phosphorothioate 5'-(E)-Vinylphosphonate
  modified_base 2: mod_base = OTHER; note = 2'-deoxy-2'-fluorocytidine-3'-phosphorothioate
  modified_base 3: mod_base = OTHER; note = 2'-O-methyluridine-3'-phosphate
  modified_base 4: mod_base = OTHER; note = 2'-O-methyluridine-3'-phosphate
  modified_base 5: mod_base = OTHER; note = 2'-O-methyladenosine-3'-phosphate
  modified_base 6: mod_base = OTHER; note = 2'-deoxy-2'-fluorocytidine-3'-phosphate
  modified_base 7: mod_base = OTHER; note = 2'-O-methyluridine-3'-phosphate
  modified_base 8: mod_base = OTHER; note = 2'-deoxy-2'-fluoroguanosine-3'-phosphate
  modified_base 9: mod_base = OTHER; note = 2'-deoxy-2'-fluorouridine-3'-phosphate
  modified_base 10: mod_base = OTHER; note = 2'-O-methylguanosine-3'-phosphate
  modified_base 11: mod_base = OTHER; note = 2'-O-methylguanosine-3'-phosphate
  modified_base 12: mod_base = OTHER; note = 2'-O-methyladenosine-3'-phosphate
  modified_base 13: mod_base = OTHER; note = 2'-O-methyladenosine-3'-phosphate
  modified_base 14: mod_base = OTHER; note = 2'-deoxy-2'-fluoroadenosine-3'-phosphate
  modified_base 15: mod_base = OTHER; note = 2'-O-methylcytidine-3'-phosphate
  modified_base 16: mod_base = OTHER; note = 2'-deoxy-2'-fluorouridine-3'-phosphate
  modified_base 17: mod_base = OTHER; note = 2'-O-methyladenosine-3'-phosphate
  modified_base 18: mod_base = OTHER; note = 2'-O-methyladenosine-3'-phosphate
  modified_base 19: mod_base = OTHER; note = 2'-O-methylguanosine-3'-phosphate
  modified_base 20: mod_base = OTHER; note = 2'-O-methyladenosine-3'-phosphate
  modified_base 21: mod_base = OTHER; note = 2'-O-methylcytidine-3'-phosphorothioate
  modified_base 22: mod_base = OTHER; note = 2'-O-methyladenosine-3'-phosphorothioate
  modified_base 23: mod_base = OTHER; note = 2'-O-methylcytidine
tcttactgtggaaactaagacac

SEQ ID NO: 180 - RNA, 23 nt, synthetic construct
  source 1..23: mol_type = other RNA
  modified_base 1: mod_base = OTHER; note = 2'-O-methyluridine-3'-phosphorothioate 5'-(E)-Vinylphosphonate
  modified_base 2: mod_base = OTHER; note = 2'-deoxy-2'-fluorocytidine-3'-phosphorothioate
  modified_base 3: mod_base = OTHER; note = 2'-O-methylcytidine-3'-phosphate
  modified_base 4: mod_base = OTHER; note = 2'-O-methyluridine-3'-phosphate
  modified_base 5: mod_base = OTHER; note = 2'-O-methyluridine-3'-phosphate
  modified_base 6: mod_base = OTHER; note = 2'-deoxy-2'-fluoroadenosine-3'-phosphate
  modified_base 7: mod_base = OTHER; note = 2'-O-methylcytidine-3'-phosphate
  modified_base 8: mod_base = OTHER; note = 2'-deoxy-2'-fluorouridine-3'-phosphate
  modified_base 9: mod_base = OTHER; note = 2'-deoxy-2'-fluoroguanosine-3'-phosphate
  modified_base 10: mod_base = OTHER; note = 2'-O-methyluridine-3'-phosphate
  modified_base 11: mod_base = OTHER; note = 2'-O-methylguanosine-3'-phosphate
  modified_base 12: mod_base = OTHER; note = 2'-O-methylguanosine-3'-phosphate
  modified_base 13: mod_base = OTHER; note = 2'-O-methyladenosine-3'-phosphate
  modified_base 14: mod_base = OTHER; note = 2'-deoxy-2'-fluoroadenosine-3'-phosphate
  modified_base 15: mod_base = OTHER; note = 2'-O-methyladenosine-3'-phosphate
  modified_base 16: mod_base = OTHER; note = 2'-deoxy-2'-fluorocytidine-3'-phosphate
  modified_base 17: mod_base = OTHER; note = 2'-O-methyluridine-3'-phosphate
  modified_base 18: mod_base = OTHER; note = 2'-O-methyladenosine-3'-phosphate
  modified_base 19: mod_base = OTHER; note = 2'-O-methyladenosine-3'-phosphate
  modified_base 20: mod_base = OTHER; note = 2'-O-methylguanosine-3'-phosphate
  modified_base 21: mod_base = OTHER; note = 2'-O-methyladenosine-3'-phosphorothioate
  modified_base 22: mod_base = OTHER; note = 2'-O-methylcytidine-3'-phosphorothioate
  modified_base 23: mod_base = OTHER; note = 2'-O-methyladenosine
tccttactgtggaaactaagaca

SEQ ID NO: 181 - RNA, 23 nt, synthetic construct
  source 1..23: mol_type = other RNA
  modified_base 1: mod_base = OTHER; note = 2'-O-methyluridine-3'-phosphorothioate 5'-(E)-Vinylphosphonate
  modified_base 2: mod_base = OTHER; note = 2'-deoxy-2'-fluoroadenosine-3'-phosphorothioate
  modified_base 3: mod_base = OTHER; note = 2'-O-methyladenosine-3'-phosphate
  modified_base 4: mod_base = OTHER; note = 2'-O-methylcytidine-3'-phosphate
  modified_base 5: mod_base = OTHER; note = 2'-O-methylcytidine-3'-phosphate
  modified_base 6: mod_base = OTHER; note = 2'-deoxy-2'-fluorouridine-3'-phosphate
  modified_base 7: mod_base = OTHER; note = 2'-O-methyluridine-3'-phosphate
  modified_base 8: mod_base = OTHER; note = 2'-deoxy-2'-fluoroadenosine-3'-phosphate
  modified_base 9: mod_base = OTHER; note = 2'-deoxy-2'-fluorocytidine-3'-phosphate
  modified_base 10: mod_base = OTHER; note = 2'-O-methyluridine-3'-phosphate
  modified_base 11: mod_base = OTHER; note = 2'-O-methylguanosine-3'-phosphate
  modified_base 12: mod_base = OTHER; note = 2'-O-methyluridine-3'-phosphate
  modified_base 13: mod_base = OTHER; note = 2'-O-methylguanosine-3'-phosphate
  modified_base 14: mod_base = OTHER; note = 2'-deoxy-2'-fluoroguanosine-3'-phosphate
  modified_base 15: mod_base = OTHER; note = 2'-O-methyladenosine-3'-phosphate
  modified_base 16: mod_base = OTHER; note = 2'-deoxy-2'-fluoroadenosine-3'-phosphate
  modified_base 17: mod_base = OTHER; note = 2'-O-methyladenosine-3'-phosphate
  modified_base 18: mod_base = OTHER; note = 2'-O-methylcytidine-3'-phosphate
  modified_base 19: mod_base = OTHER; note = 2'-O-methyluridine-3'-phosphate
  modified_base 20: mod_base = OTHER; note = 2'-O-methyladenosine-3'-phosphate
  modified_base 21: mod_base = OTHER; note = 2'-O-methyladenosine-3'-phosphorothioate
  modified_base 22: mod_base = OTHER; note = 2'-O-methylguanosine-3'-phosphorothioate
  modified_base 23: mod_base = OTHER; note = 2'-O-methyladenosine
taaccttactgtggaaactaaga

SEQ ID NO: 182 - RNA, 23 nt, synthetic construct
  source 1..23: mol_type = other RNA
  modified_base 1: mod_base = OTHER; note = 2'-O-methyluridine-3'-phosphorothioate 5'-(E)-Vinylphosphonate
  modified_base 2: mod_base = OTHER; note = 2'-deoxy-2'-fluoroadenosine-3'-phosphorothioate
  modified_base 3: mod_base = OTHER; note = 2'-O-methyladenosine-3'-phosphate
  modified_base 4: mod_base = OTHER; note = 2'-O-methyluridine-3'-phosphate
  modified_base 5: mod_base = OTHER; note = 2'-O-methyluridine-3'-phosphate
  modified_base 6: mod_base = OTHER; note = 2'-deoxy-2'-fluorouridine-3'-phosphate
  modified_base 7: mod_base = OTHER; note = 2'-O-methyladenosine-3'-phosphate
  modified_base 8: mod_base = OTHER; note = 2'-deoxy-2'-fluorouridine-3'-phosphate
  modified_base 9: mod_base = OTHER; note = 2'-deoxy-2'-fluorouridine-3'-phosphate
  modified_base 10: mod_base = OTHER; note = 2'-O-methylguanosine-3'-phosphate
  modified_base 11: mod_base = OTHER; note = 2'-O-methyladenosine-3'-phosphate
  modified_base 12: mod_base = OTHER; note = 2'-O-methyladenosine-3'-phosphate
  modified_base 13: mod_base = OTHER; note = 2'-O-methylcytidine-3'-phosphate
  modified_base 14: mod_base = OTHER; note = 2'-deoxy-2'-fluoroadenosine-3'-phosphate
  modified_base 15: mod_base = OTHER; note = 2'-O-methylguanosine-3'-phosphate
  modified_base 16: mod_base = OTHER; note = 2'-deoxy-2'-fluoroadenosine-3'-phosphate
  modified_base 17: mod_base = OTHER; note = 2'-O-methylguanosine-3'-phosphate
  modified_base 18: mod_base = OTHER; note = 2'-O-methylguanosine-3'-phosphate
  modified_base 19: mod_base = OTHER; note = 2'-O-methyluridine-3'-phosphate
  modified_base 20: mod_base = OTHER; note = 2'-O-methylcytidine-3'-phosphate
  modified_base 21: mod_base = OTHER; note = 2'-O-methyluridine-3'-phosphorothioate
  modified_base 22: mod_base = OTHER; note = 2'-O-methylguanosine-3'-phosphorothioate
  modified_base 23: mod_base = OTHER; note = 2'-O-methyluridine
taatttattgaacagaggtctgt

SEQ ID NO: 183 - RNA, 23 nt, synthetic construct
  source 1..23: mol_type = other RNA
  modified_base 1: mod_base = OTHER; note = 2'-O-methyluridine-3'-phosphorothioate 5'-(E)-Vinylphosphonate
  modified_base 2: mod_base = OTHER; note = 2'-deoxy-2'-fluoroadenosine-3'-phosphorothioate
  modified_base 3: mod_base = OTHER; note = 2'-O-methyluridine-3'-phosphate
  modified_base 4: mod_base = OTHER; note = 2'-O-methyladenosine-3'-phosphate
  modified_base 5: mod_base = OTHER; note = 2'-O-methyladenosine-3'-phosphate
  modified_base 6: mod_base = OTHER; note = 2'-deoxy-2'-fluorouridine-3'-phosphate
  modified_base 7: mod_base = OTHER; note = 2'-O-methyluridine-3'-phosphate
  modified_base 8: mod_base = OTHER; note = 2'-deoxy-2'-fluorouridine-3'-phosphate
  modified_base 9: mod_base = OTHER; note = 2'-deoxy-2'-fluoroadenosine-3'-phosphate
  modified_base 10: mod_base = OTHER; note = 2'-O-methyluridine-3'-phosphate
  modified_base 11: mod_base = OTHER; note = 2'-O-methyluridine-3'-phosphate
  modified_base 12: mod_base = OTHER; note = 2'-O-methylguanosine-3'-phosphate
  modified_base 13: mod_base = OTHER; note = 2'-O-methyladenosine-3'-phosphate
  modified_base 14: mod_base = OTHER; note = 2'-deoxy-2'-fluoroadenosine-3'-phosphate
  modified_base 15: mod_base = OTHER; note = 2'-O-methylcytidine-3'-phosphate
  modified_base 16: mod_base = OTHER; note = 2'-deoxy-2'-fluoroadenosine-3'-phosphate
  modified_base 17: mod_base = OTHER; note = 2'-O-methylguanosine-3'-phosphate
  modified_base 18: mod_base = OTHER; note = 2'-O-methyladenosine-3'-phosphate
  modified_base 19: mod_base = OTHER; note = 2'-O-methylguanosine-3'-phosphate
  modified_base 20: mod_base = OTHER; note = 2'-O-methylguanosine-3'-phosphate
  modified_base 21: mod_base = OTHER; note = 2'-O-methyluridine-3'-phosphorothioate
  modified_base 22: mod_base = OTHER; note = 2'-O-methylcytidine-3'-phosphorothioate
  modified_base 23: mod_base = OTHER; note = 2'-O-methyluridine
tataatttattgaacagaggtct

SEQ ID NO: 184 - RNA, 23 nt, synthetic construct
  source 1..23: mol_type = other RNA
  modified_base 1: mod_base = OTHER; note = 2'-O-methyluridine-3'-phosphorothioate 5'-(E)-Vinylphosphonate
  modified_base 2: mod_base = OTHER; note = 2'-deoxy-2'-fluorocytidine-3'-phosphorothioate
  modified_base 3: mod_base = OTHER; note = 2'-O-methyladenosine-3'-phosphate
  modified_base 4: mod_base = OTHER; note = 2'-O-methyladenosine-3'-phosphate
  modified_base 5: mod_base = OTHER; note = 2'-O-methyluridine-3'-phosphate
  modified_base 6: mod_base = OTHER; note = 2'-deoxy-2'-fluoroadenosine-3'-phosphate
  modified_base 7: mod_base = OTHER; note = 2'-O-methyladenosine-3'-phosphate
  modified_base 8: mod_base = OTHER; note = 2'-deoxy-2'-fluorouridine-3'-phosphate
  modified_base 9: mod_base = OTHER; note = 2'-deoxy-2'-fluorouridine-3'-phosphate
  modified_base 10: mod_base = OTHER; note = 2'-O-methyluridine-3'-phosphate
  modified_base 11: mod_base = OTHER; note = 2'-O-methyladenosine-3'-phosphate
  modified_base 12: mod_base = OTHER; note = 2'-O-methyluridine-3'-phosphate
  modified_base 13: mod_base = OTHER; note = 2'-O-methyluridine-3'-phosphate
  modified_base 14: mod_base = OTHER; note = 2'-deoxy-2'-fluoroguanosine-3'-phosphate
  modified_base 15: mod_base = OTHER; note = 2'-O-methyladenosine-3'-phosphate
  modified_base 16: mod_base = OTHER; note = 2'-deoxy-2'-fluoroadenosine-3'-phosphate
  modified_base 17: mod_base = OTHER; note = 2'-O-methylcytidine-3'-phosphate
  modified_base 18: mod_base = OTHER; note = 2'-O-methyladenosine-3'-phosphate
  modified_base 19: mod_base = OTHER; note = 2'-O-methylguanosine-3'-phosphate
  modified_base 20: mod_base = OTHER; note = 2'-O-methyladenosine-3'-phosphate
  modified_base 21: mod_base = OTHER; note = 2'-O-methylguanosine-3'-phosphorothioate
  modified_base 22: mod_base = OTHER; note = 2'-O-methylguanosine-3'-phosphorothioate
  modified_base 23: mod_base = OTHER; note = 2'-O-methyluridine
tcaataatttattgaacagaggt

SEQ ID NO: 185 - RNA, 23 nt, synthetic construct
  source 1..23: mol_type = other RNA
  modified_base 1: mod_base = OTHER; note = 2'-O-methyluridine-3'-phosphorothioate 5'-(E)-Vinylphosphonate
  modified_base 2: mod_base = OTHER; note = 2'-deoxy-2'-fluorocytidine-3'-phosphorothioate
  modified_base 3: mod_base = OTHER; note = 2'-O-methylcytidine-3'-phosphate
  modified_base 4: mod_base = OTHER; note = 2'-O-methyladenosine-3'-phosphate
  modified_base 5: mod_base = OTHER; note = 2'-O-methyladenosine-3'-phosphate
  modified_base 6: mod_base = OTHER; note = 2'-deoxy-2'-fluorouridine-3'-phosphate
  modified_base 7: mod_base = OTHER; note = 2'-O-methyladenosine-3'-phosphate
  modified_base 8: mod_base = OTHER; note = 2'-deoxy-2'-fluoroadenosine-3'-phosphate
  modified_base 9: mod_base = OTHER; note = 2'-deoxy-2'-fluorouridine-3'-phosphate
  modified_base 10: mod_base = OTHER; note = 2'-O-methyluridine-3'-phosphate
  modified_base 11: mod_base = OTHER; note = 2'-O-methyluridine-3'-phosphate
  modified_base 12: mod_base = OTHER; note = 2'-O-methyladenosine-3'-phosphate
  modified_base 13: mod_base = OTHER; note = 2'-O-methyluridine-3'-phosphate
  modified_base 14: mod_base = OTHER; note = 2'-deoxy-2'-fluorouridine-3'-phosphate
  modified_base 15: mod_base = OTHER; note = 2'-O-methylguanosine-3'-phosphate
  modified_base 16: mod_base = OTHER; note = 2'-deoxy-2'-fluoroadenosine-3'-phosphate
  modified_base 17: mod_base = OTHER; note = 2'-O-methyladenosine-3'-phosphate
  modified_base 18: mod_base = OTHER; note = 2'-O-methylcytidine-3'-phosphate
  modified_base 19: mod_base = OTHER; note = 2'-O-methyladenosine-3'-phosphate
  modified_base 20: mod_base = OTHER; note = 2'-O-methylguanosine-3'-phosphate
  modified_base 21: mod_base = OTHER; note = 2'-O-methyladenosine-3'-phosphorothioate
  modified_base 22: mod_base = OTHER; note = 2'-O-methylguanosine-3'-phosphorothioate
  modified_base 23: mod_base = OTHER; note = 2'-O-methylguanosine
tccaataatttattgaacagagg

SEQ ID NO: 186 - RNA, 23 nt, synthetic construct
  source 1..23: mol_type = other RNA
  modified_base 1: mod_base = OTHER; note = 2'-O-methyluridine-3'-phosphorothioate 5'-(E)-Vinylphosphonate
  modified_base 2: mod_base = OTHER; note = 2'-deoxy-2'-fluoroguanosine-3'-phosphorothioate
  modified_base 3: mod_base = OTHER; note = 2'-O-methylcytidine-3'-phosphate
  modified_base 4: mod_base = OTHER; note = 2'-O-methylcytidine-3'-phosphate
  modified_base 5: mod_base = OTHER; note = 2'-O-methyladenosine-3'-phosphate
  modified_base 6: mod_base = OTHER; note = 2'-deoxy-2'-fluoroadenosine-3'-phosphate
  modified_base 7: mod_base = OTHER; note = 2'-O-methyluridine-3'-phosphate
  modified_base 8: mod_base = OTHER; note = 2'-deoxy-2'-fluoroadenosine-3'-phosphate
  modified_base 9: mod_base = OTHER; note = 2'-deoxy-2'-fluoroadenosine-3'-phosphate
  modified_base 10: mod_base = OTHER; note = 2'-O-methyluridine-3'-phosphate
  modified_base 11: mod_base = OTHER; note = 2'-O-methyluridine-3'-phosphate
  modified_base 12: mod_base = OTHER; note = 2'-O-methyluridine-3'-phosphate
  modified_base 13: mod_base = OTHER; note = 2'-O-methyladenosine-3'-phosphate
  modified_base 14: mod_base = OTHER; note = 2'-deoxy-2'-fluorouridine-3'-phosphate
  modified_base 15: mod_base = OTHER; note = 2'-O-methyluridine-3'-phosphate
  modified_base 16: mod_base = OTHER; note = 2'-deoxy-2'-fluoroguanosine-3'-phosphate
  modified_base 17: mod_base = OTHER; note = 2'-O-methyladenosine-3'-phosphate
  modified_base 18: mod_base = OTHER; note = 2'-O-methyladenosine-3'-phosphate
  modified_base 19: mod_base = OTHER; note = 2'-O-methylcytidine-3'-phosphate
  modified_base 20: mod_base = OTHER; note = 2'-O-methyladenosine-3'-phosphate
  modified_base 21: mod_base = OTHER; note = 2'-O-methylguanosine-3'-phosphorothioate
  modified_base 22: mod_base = OTHER; note = 2'-O-methyladenosine-3'-phosphorothioate
  modified_base 23: mod_base = OTHER; note = 2'-O-methylguanosine
tgccaataatttattgaacagag

SEQ ID NO: 187 - RNA, 23 nt, synthetic construct
  source 1..23: mol_type = other RNA
  modified_base 1: mod_base = OTHER; note = 2'-O-methyluridine-3'-phosphorothioate 5'-(E)-Vinylphosphonate
  modified_base 2: mod_base = OTHER; note = 2'-deoxy-2'-fluorouridine-3'-phosphorothioate
  modified_base 3: mod_base = OTHER; note = 2'-O-methylguanosine-3'-phosphate
  modified_base 4: mod_base = OTHER; note = 2'-O-methylcytidine-3'-phosphate
  modified_base 5: mod_base = OTHER; note = 2'-O-methylcytidine-3'-phosphate
  modified_base 6: mod_base = OTHER; note = 2'-deoxy-2'-fluoroadenosine-3'-phosphate
  modified_base 7: mod_base = OTHER; note = 2'-O-methyladenosine-3'-phosphate
  modified_base 8: mod_base = OTHER; note = 2'-deoxy-2'-fluorouridine-3'-phosphate
  modified_base 9: mod_base = OTHER; note = 2'-deoxy-2'-fluoroadenosine-3'-phosphate
  modified_base 10: mod_base = OTHER; note = 2'-O-methyladenosine-3'-phosphate
  modified_base 11: mod_base = OTHER; note = 2'-O-methyluridine-3'-phosphate
  modified_base 12: mod_base = OTHER; note = 2'-O-methyluridine-3'-phosphate
  modified_base 13: mod_base = OTHER; note = 2'-O-methyluridine-3'-phosphate
  modified_base 14: mod_base = OTHER; note = 2'-deoxy-2'-fluoroadenosine-3'-phosphate
  modified_base 15: mod_base = OTHER; note = 2'-O-methyluridine-3'-phosphate
  modified_base 16: mod_base = OTHER; note = 2'-deoxy-2'-fluorouridine-3'-phosphate
  modified_base 17: mod_base = OTHER; note = 2'-O-methylguanosine-3'-phosphate
  modified_base 18: mod_base = OTHER; note = 2'-O-methyladenosine-3'-phosphate
  modified_base 19: mod_base = OTHER; note = 2'-O-methyladenosine-3'-phosphate
  modified_base 20: mod_base = OTHER; note = 2'-O-methylcytidine-3'-phosphate
  modified_base 21: mod_base = OTHER; note = 2'-O-methyladenosine-3'-phosphorothioate
  modified_base 22: mod_base = OTHER; note = 2'-O-methylguanosine-3'-phosphorothioate
  modified_base 23: mod_base = OTHER; note = 2'-O-methyladenosine
ttgccaataatttattgaacaga

SEQ ID NO: 188 - RNA, 23 nt, synthetic construct
  source 1..23: mol_type = other RNA
  modified_base 1: mod_base = OTHER; note = 2'-O-methyluridine-3'-phosphorothioate 5'-(E)-Vinylphosphonate
  modified_base 2: mod_base = OTHER; note = 2'-deoxy-2'-fluorocytidine-3'-phosphorothioate
  modified_base 3: mod_base = OTHER; note = 2'-O-methyladenosine-3'-phosphate
  modified_base 4: mod_base = OTHER; note = 2'-O-methyluridine-3'-phosphate
  modified_base 5: mod_base = OTHER; note = 2'-O-methylguanosine-3'-phosphate
  modified_base 6: mod_base = OTHER; note = 2'-deoxy-2'-fluorocytidine-3'-phosphate
  modified_base 7: mod_base = OTHER; note = 2'-O-methylcytidine-3'-phosphate
  modified_base 8: mod_base = OTHER; note = 2'-deoxy-2'-fluoroadenosine-3'-phosphate
  modified_base 9: mod_base = OTHER; note = 2'-deoxy-2'-fluoroadenosine-3'-phosphate
  modified_base 10: mod_base = OTHER; note = 2'-O-methyluridine-3'-phosphate
  modified_base 11: mod_base = OTHER; note = 2'-O-methyladenosine-3'-phosphate
  modified_base 12: mod_base = OTHER; note = 2'-O-methyladenosine-3'-phosphate
  modified_base 13: mod_base = OTHER; note = 2'-O-methyluridine-3'-phosphate
  modified_base 14: mod_base = OTHER; note = 2'-deoxy-2'-fluorouridine-3'-phosphate
  modified_base 15: mod_base = OTHER; note = 2'-O-methyluridine-3'-phosphate
  modified_base 16: mod_base = OTHER; note = 2'-deoxy-2'-fluoroadenosine-3'-phosphate
  modified_base 17: mod_base = OTHER; note = 2'-O-methyluridine-3'-phosphate
  modified_base 18: mod_base = OTHER; note = 2'-O-methyluridine-3'-phosphate
  modified_base 19: mod_base = OTHER; note = 2'-O-methylguanosine-3'-phosphate
  modified_base 20: mod_base = OTHER; note = 2'-O-methyladenosine-3'-phosphate
  modified_base 21: mod_base = OTHER; note = 2'-O-methyladenosine-3'-phosphorothioate
  modified_base 22: mod_base = OTHER; note = 2'-O-methylcytidine-3'-phosphorothioate
  modified_base 23: mod_base = OTHER; note = 2'-O-methyladenosine
tcatgccaataatttattgaaca

SEQ ID NO: 189 - RNA, 23 nt, synthetic construct
  source 1..23: mol_type = other RNA
ggcttacactgacatcaaagtga

SEQ ID NO: 190 - RNA, 23 nt, synthetic construct
  source 1..23: mol_type = other RNA
actgacatcaaagtgattggtaa

SEQ ID NO: 191 - RNA, 23 nt, synthetic construct
  source 1..23: mol_type = other RNA
ggccatcaagaaggttcttcagg

SEQ ID NO: 192 - RNA, 23 nt, synthetic construct
  source 1..23: mol_type = other RNA
gaaggttcttcaggacaaaaggt

SEQ ID NO: 193 - RNA, 23 nt, synthetic construct
  source 1..23: mol_type = other RNA
aaggttcttcaggacaaaaggtt

SEQ ID NO: 194 - RNA, 23 nt, synthetic construct
  source 1..23: mol_type = other RNA
aggttcttcaggacaaaaggttc

SEQ ID NO: 195 - RNA, 23 nt, synthetic construct
  source 1..23: mol_type = other RNA
cgagaactgcagattatgcgtaa

SEQ ID NO: 196 - RNA, 23 nt, synthetic construct
  source 1..23: mol_type = other RNA
actgcagattatgcgtaagctgg

SEQ ID NO: 197 - RNA, 23 nt, synthetic construct
  source 1..23: mol_type = other RNA
cctatcatctacatcaaggtgta

SEQ ID NO: 198 - RNA, 23 nt, synthetic construct
  source 1..23: mol_type = other RNA
gctgtcctcaagctctgcgattt

SEQ ID NO: 199 - RNA, 23 nt, synthetic construct
  source 1..23: mol_type = other RNA
tcctcaagctctgcgattttggc

SEQ ID NO: 200 - RNA, 23 nt, synthetic construct
  source 1..23: mol_type = other RNA
cctcaagctctgcgattttggca

SEQ ID NO: 201 - RNA, 23 nt, synthetic construct
  source 1..23: mol_type = other RNA
ctcaagctctgcgattttggcag

SEQ ID NO: 202 - RNA, 23 nt, synthetic construct
  source 1..23: mol_type = other RNA
tcaagctctgcgattttggcagt

SEQ ID NO: 203 - RNA, 23 nt, synthetic construct
  source 1..23: mol_type = other RNA
agcccaatgtgtcctacatctgc

SEQ ID NO: 204 - RNA, 23 nt, synthetic construct
  source 1..23: mol_type = other RNA
cgtgctccagaactcatctttgg

SEQ ID NO: 205 - RNA, 23 nt, synthetic construct
  source 1..23: mol_type = other RNA
gtgctccagaactcatctttgga

SEQ ID NO: 206 - RNA, 23 nt, synthetic construct
  source 1..23: mol_type = other RNA
tgctccagaactcatctttggag

SEQ ID NO: 207 - RNA, 23 nt, synthetic construct
  source 1..23: mol_type = other RNA
gctccagaactcatctttggagc

SEQ ID NO: 208 - RNA, 23 nt, synthetic construct
  source 1..23: mol_type = other RNA
ctccagaactcatctttggagcc

SEQ ID NO: 209 - RNA, 23 nt, synthetic construct
  source 1..23: mol_type = other RNA
ccgagagatgaaccctaactata

SEQ ID NO: 210 - RNA, 23 nt, synthetic construct
  source 1..23: mol_type = other RNA
tggacaaaggtgttcaaatcttc

SEQ ID NO: 211 - RNA, 23 nt, synthetic construct
  source 1..23: mol_type = other RNA
gtgcccacagcttcttcgatgaa

SEQ ID NO: 212 - RNA, 23 nt, synthetic construct
  source 1..23: mol_type = other RNA
acagcttcttcgatgaactgcgg

SEQ ID NO: 213 - RNA, 23 nt, synthetic construct
  source 1..23: mol_type = other RNA
acccatcctcacaagctttaact

SEQ ID NO: 214 - RNA, 23 nt, synthetic construct
  source 1..23: mol_type = other RNA
cccatcctcacaagctttaactg

SEQ ID NO: 215 - RNA, 23 nt, synthetic construct
  source 1..23: mol_type = other RNA
ccatcctcacaagctttaactga

SEQ ID NO: 216 - RNA, 23 nt, synthetic construct
  source 1..23: mol_type = other RNA
taaagaggattttaactgtttgt

SEQ ID NO: 217 - RNA, 23 nt, synthetic construct
  source 1..23: mol_type = other RNA
aaagaggattttaactgtttgta

SEQ ID NO: 218 - RNA, 23 nt, synthetic construct
  source 1..23: mol_type = other RNA
aagaggattttaactgtttgtag

SEQ ID NO: 219 - RNA, 23 nt, synthetic construct
  source 1..23: mol_type = other RNA
cctgggtgtaaatagattgttat

SEQ ID NO: 220 - RNA, 23 nt, synthetic construct
  source 1..23: mol_type = other RNA
ctgggtgtaaatagattgttata

SEQ ID NO: 221 - RNA, 23 nt, synthetic construct
  source 1..23: mol_type = other RNA
tcaattcacaccattcaacttgc

SEQ ID NO: 222 - RNA, 23 nt, synthetic construct
  source 1..23: mol_type = other RNA
gagtccctggtgtcttagtttcc

SEQ ID NO: 223 - RNA, 23 nt, synthetic construct
  source 1..23: mol_type = other RNA
gtgtcttagtttccacagtaagg

SEQ ID NO: 224 - RNA, 23 nt, synthetic construct
  source 1..23: mol_type = other RNA
tgtcttagtttccacagtaaggt

SEQ ID NO: 225 - RNA, 23 nt, synthetic construct
  source 1..23: mol_type = other RNA
tcttagtttccacagtaaggttt

SEQ ID NO: 226 - RNA, 23 nt, synthetic construct
  source 1..23: mol_type = other RNA
acagacctctgttcaataaatta

SEQ ID NO: 227 - RNA, 23 nt, synthetic construct
  source 1..23: mol_type = other RNA
agacctctgttcaataaattatt

SEQ ID NO: 228 - RNA, 23 nt, synthetic construct
  source 1..23: mol_type = other RNA
acctctgttcaataaattattgg

SEQ ID NO: 229 - RNA, 23 nt, synthetic construct
  source 1..23: mol_type = other RNA
cctctgttcaataaattattggc

SEQ ID NO: 230 - RNA, 23 nt, synthetic construct
  source 1..23: mol_type = other RNA
ctctgttcaataaattattggca

SEQ ID NO: 231 - RNA, 23 nt, synthetic construct
  source 1..23: mol_type = other RNA
tctgttcaataaattattggcat

SEQ ID NO: 232 - RNA, 23 nt, synthetic construct
  source 1..23: mol_type = other RNA
tgttcaataaattattggcatga

SEQ ID NO: 233 - RNA, 21 nt, synthetic construct
  source 1..21: mol_type = other RNA
  modified_base 1: mod_base = OTHER; note = 2'-O-methylcytidine-3'-phosphorothioate
  modified_base 2: mod_base = OTHER; note = 2'-O-methylcytidine-3'-phosphorothioate
  modified_base 3: mod_base = OTHER; note = 2'-O-methyladenosine-3'-phosphate
  modified_base 4: mod_base = OTHER; note = 2'-O-methyluridine-3'-phosphate
  modified_base 5: mod_base = OTHER; note = 2'-O-methylcytidine-3'-phosphate
  modified_base 6: mod_base = OTHER; note = 2'-O-hexadecyl-cytidine-3'-phosphate
  modified_base 7: mod_base = OTHER; note = 2'-deoxy-2'-fluorouridine-3'-phosphate
  modified_base 8: mod_base = OTHER; note = 2'-O-methylcytidine-3'-phosphate
  modified_base 9: mod_base = OTHER; note = 2'-deoxy-2'-fluoroadenosine-3'-phosphate
  modified_base 10: mod_base = OTHER; note = 2'-deoxy-2'-fluorocytidine-3'-phosphate
  modified_base 11: mod_base = OTHER; note = 2'-deoxy-2'-fluoroadenosine-3'-phosphate
  modified_base 12: mod_base = OTHER; note = 2'-O-methyladenosine-3'-phosphate
  modified_base 13: mod_base = OTHER; note = 2'-O-methylguanosine-3'-phosphate
  modified_base 14: mod_base = OTHER; note = 2'-O-methylcytidine-3'-phosphate
  modified_base 15: mod_base = OTHER; note = 2'-O-methyluridine-3'-phosphate
  modified_base 16: mod_base = OTHER; note = 2'-O-methyluridine-3'-phosphate
  modified_base 17: mod_base = OTHER; note = 2'-O-methyluridine-3'-phosphate
  modified_base 18: mod_base = OTHER; note = 2'-O-methyladenosine-3'-phosphate
  modified_base 19: mod_base = OTHER; note = 2'-O-methyladenosine-3'-phosphorothioate
  modified_base 20: mod_base = OTHER; note = 2'-O-methylcytidine-3'-phosphorothioate
  modified_base 21: mod_base = OTHER; note = 2'-O-methyladenosine
ccatcctcacaagctttaaca

SEQ ID NO: 234 - RNA, 21 nt, synthetic construct
  source 1..21: mol_type = other RNA
  modified_base 1: mod_base = OTHER; note = 2'-O-methylguanosine-3'-phosphorothioate
  modified_base 2: mod_base = OTHER; note = 2'-O-methyladenosine-3'-phosphorothioate
  modified_base 3: mod_base = OTHER; note = 2'-O-methylguanosine-3'-phosphate
  modified_base 4: mod_base = OTHER; note = 2'-O-methylguanosine-3'-phosphate
  modified_base 5: mod_base = OTHER; note = 2'-O-methyladenosine-3'-phosphate
  modified_base 6: mod_base = OTHER; note = 2'-O-hexadecyl-uridine-3'-phosphate
  modified_base 7: mod_base = OTHER; note = 2'-deoxy-2'-fluorouridine-3'-phosphate
  modified_base 8: mod_base = OTHER; note = 2'-O-methyluridine-3'-phosphate
  modified_base 9: mod_base = OTHER; note = 2'-deoxy-2'-fluorouridine-3'-phosphate
  modified_base 10: mod_base = OTHER; note = 2'-deoxy-2'-fluoroadenosine-3'-phosphate
  modified_base 11: mod_base = OTHER; note = 2'-deoxy-2'-fluoroadenosine-3'-phosphate
  modified_base 12: mod_base = OTHER; note = 2'-O-methylcytidine-3'-phosphate
  modified_base 13: mod_base = OTHER; note = 2'-O-methyluridine-3'-phosphate
  modified_base 14: mod_base = OTHER; note = 2'-O-methylguanosine-3'-phosphate
  modified_base 15: mod_base = OTHER; note = 2'-O-methyluridine-3'-phosphate
  modified_base 16: mod_base = OTHER; note = 2'-O-methyluridine-3'-phosphate
  modified_base 17: mod_base = OTHER; note = 2'-O-methyluridine-3'-phosphate
  modified_base 18: mod_base = OTHER; note = 2'-O-methylguanosine-3'-phosphate
  modified_base 19: mod_base = OTHER; note = 2'-O-methyluridine-3'-phosphorothioate
  modified_base 20: mod_base = OTHER; note = 2'-O-methyladenosine-3'-phosphorothioate
  modified_base 21: mod_base = OTHER; note = 2'-O-methyladenosine
gaggattttaactgtttgtaa

SEQ ID NO: 235 - RNA, 21 nt, synthetic construct
  source 1..21: mol_type = other RNA
  modified_base 1: mod_base = OTHER; note = 2'-O-methyladenosine-3'-phosphorothioate
  modified_base 2: mod_base = OTHER; note = 2'-O-methyladenosine-3'-phosphorothioate
  modified_base 3: mod_base = OTHER; note = 2'-O-methyluridine-3'-phosphate
  modified_base 4: mod_base = OTHER; note = 2'-O-methyluridine-3'-phosphate
  modified_base 5: mod_base = OTHER; note = 2'-O-methylcytidine-3'-phosphate
  modified_base 6: mod_base = OTHER; note = 2'-O-hexadecyl-adenosine-3'-phosphate
  modified_base 7: mod_base = OTHER; note = 2'-deoxy-2'-fluorocytidine-3'-phosphate
  modified_base 8: mod_base = OTHER; note = 2'-O-methyladenosine-3'-phosphate
  modified_base 9: mod_base = OTHER; note = 2'-deoxy-2'-fluorocytidine-3'-phosphate
  modified_base 10: mod_base = OTHER; note = 2'-deoxy-2'-fluorocytidine-3'-phosphate
  modified_base 11: mod_base = OTHER; note = 2'-deoxy-2'-fluoroadenosine-3'-phosphate
  modified_base 12: mod_base = OTHER; note = 2'-O-methyluridine-3'-phosphate
  modified_base 13: mod_base = OTHER; note = 2'-O-methyluridine-3'-phosphate
  modified_base 14: mod_base = OTHER; note = 2'-O-methylcytidine-3'-phosphate
  modified_base 15: mod_base = OTHER; note = 2'-O-methyladenosine-3'-phosphate
  modified_base 16: mod_base = OTHER; note = 2'-O-methyladenosine-3'-phosphate
  modified_base 17: mod_base = OTHER; note = 2'-O-methylcytidine-3'-phosphate
  modified_base 18: mod_base = OTHER; note = 2'-O-methyluridine-3'-phosphate
  modified_base 19: mod_base = OTHER; note = 2'-O-methyluridine-3'-phosphorothioate
  modified_base 20: mod_base = OTHER; note = 2'-O-methylguanosine-3'-phosphorothioate
  modified_base 21: mod_base = OTHER; note = 2'-O-methyladenosine
aattcacaccattcaacttga

SEQ ID NO: 236 - RNA, 21 nt, synthetic construct
  source 1..21: mol_type = other RNA
  modified_base 1: mod_base = OTHER; note = 2'-O-methylcytidine-3'-phosphorothioate
  modified_base 2: mod_base = OTHER; note = 2'-O-methyluridine-3'-phosphorothioate
  modified_base 3: mod_base = OTHER; note = 2'-O-methylcytidine-3'-phosphate
  modified_base 4: mod_base = OTHER; note = 2'-O-methyluridine-3'-phosphate
  modified_base 5: mod_base = OTHER; note = 2'-O-methylguanosine-3'-phosphate
  modified_base 6: mod_base = OTHER; note = 2'-O-hexadecyl-uridine-3'-phosphate
  modified_base 7: mod_base = OTHER; note = 2'-deoxy-2'-fluorouridine-3'-phosphate
  modified_base 8: mod_base = OTHER; note = 2'-O-methylcytidine-3'-phosphate
  modified_base 9: mod_base = OTHER; note = 2'-deoxy-2'-fluoroadenosine-3'-phosphate
  modified_base 10: mod_base = OTHER; note = 2'-deoxy-2'-fluoroadenosine-3'-phosphate
  modified_base 11: mod_base = OTHER; note = 2'-deoxy-2'-fluorouridine-3'-phosphate
  modified_base 12: mod_base = OTHER; note = 2'-O-methyladenosine-3'-phosphate
  modified_base 13: mod_base = OTHER; note = 2'-O-methyladenosine-3'-phosphate
  modified_base 14: mod_base = OTHER; note = 2'-O-methyladenosine-3'-phosphate
  modified_base 15: mod_base = OTHER; note = 2'-O-methyluridine-3'-phosphate
  modified_base 16: mod_base = OTHER; note = 2'-O-methyluridine-3'-phosphate
  modified_base 17: mod_base = OTHER; note = 2'-O-methyladenosine-3'-phosphate
  modified_base 18: mod_base = OTHER; note = 2'-O-methyluridine-3'-phosphate
  modified_base 19: mod_base = OTHER; note = 2'-O-methyluridine-3'-phosphorothioate
  modified_base 20: mod_base = OTHER; note = 2'-O-methylguanosine-3'-phosphorothioate
  modified_base 21: mod_base = OTHER; note = 2'-O-methyladenosine
ctctgttcaataaattattga

SEQ ID NO: 237 - RNA, 21 nt, synthetic construct
  source 1..21: mol_type = other RNA
aaggtgaccacagtcgtagca

SEQ ID NO: 238 - RNA, 21 nt, synthetic construct
  source 1..21: mol_type = other RNA
accacagtcgtagccactcta

SEQ ID NO: 239 - RNA, 21 nt, synthetic construct
  source 1..21: mol_type = other RNA
tcgtagccactctaggccaaa

SEQ ID NO: 240 - RNA, 21 nt, synthetic construct
  source 1..21: mol_type = other RNA
agcgctcccaagaagtggcta

SEQ ID NO: 241 - RNA, 21 nt, synthetic construct
  source 1..21: mol_type = other RNA
cccaagaagtggcttacacga

SEQ ID NO: 242 - RNA, 21 nt, synthetic construct
  source 1..21: mol_type = other RNA
agcgggaaggtgaccacagta

SEQ ID NO: 243 - RNA, 21 nt, synthetic construct
  source 1..21: mol_type = other RNA
ggcttacacggacatcaaaga

SEQ ID NO: 244 - RNA, 21 nt, synthetic construct
  source 1..21: mol_type = other RNA
gacatcaaagtgattggcaaa

SEQ ID NO: 245 - RNA, 21 nt, synthetic construct
  source 1..21: mol_type = other RNA
tgattggcaatggctcattta

SEQ ID NO: 246 - RNA, 21 nt, synthetic construct
  source 1..21: mol_type = other RNA
gagaccagggaactagtcgca

SEQ ID NO: 247 - RNA, 21 nt, synthetic construct
  source 1..21: mol_type = other RNA
agggaactagtcgccatcaaa

SEQ ID NO: 248 - RNA, 21 nt, synthetic construct
  source 1..21: mol_type = other RNA
ctagtcgccatcaagaaggta

SEQ ID NO: 249 - RNA, 21 nt, synthetic construct
  source 1..21: mol_type = other RNA
gccatcaagaaggttctccaa

SEQ ID NO: 250 - RNA, 21 nt, synthetic construct
  source 1..21: mol_type = other RNA
aagaaggttctccaggacaaa

SEQ ID NO: 251 - RNA, 21 nt, synthetic construct
  source 1..21: mol_type = other RNA
ccaggacaagaggttcaagaa

SEQ ID NO: 252 - RNA, 21 nt, synthetic construct
  source 1..21: mol_type = other RNA
aggttcaagaaccgagagcta

SEQ ID NO: 253 - RNA, 21 nt, synthetic construct
  source 1..21: mol_type = other RNA
aagaaccgagagctgcagata

SEQ ID NO: 254 - RNA, 21 nt, synthetic construct
  source 1..21: mol_type = other RNA
cgagagctgcagatcatgcga

SEQ ID NO: 255 - RNA, 21 nt, synthetic construct
  source 1..21: mol_type = other RNA
ctgcagatcatgcgtaagcta

SEQ ID NO: 256 - RNA, 21 nt, synthetic construct
  source 1..21: mol_type = other RNA
catgcgtaagctggaccacta

SEQ ID NO: 257 - RNA, 21 nt, synthetic construct
  source 1..21: mol_type = other RNA
ctgcaatattgtgaggctgaa

SEQ ID NO: 258 - RNA, 21 nt, synthetic construct
  source 1..21: mol_type = other RNA
tgtgaggctgagatactttta

SEQ ID NO: 259 - RNA, 21 nt, synthetic construct
  source 1..21: mol_type = other RNA
gctgagatactttttctacta

SEQ ID NO: 260 - RNA, 21 nt, synthetic construct
  source 1..21: mol_type = other RNA
atactttttctactccagtga

SEQ ID NO: 261 - RNA, 21 nt, synthetic construct
  source 1..21: mol_type = other RNA
tttctactccagtggcgagaa

SEQ ID NO: 262 - RNA, 21 nt, synthetic construct
  source 1..21: mol_type = other RNA
tccagtggcgagaagaaagaa

SEQ ID NO: 263 - RNA, 21 nt, synthetic construct
  source 1..21: mol_type = other RNA
ggcgagaagaaagacgagcta

SEQ ID NO: 264 - RNA, 21 nt, synthetic construct
  source 1..21: mol_type = other RNA
aagaaagacgagctttaccta

SEQ ID NO: 265 - RNA, 21 nt, synthetic construct
  source 1..21: mol_type = other RNA
ggaccactgcaatattgtgaa

SEQ ID NO: 266 - RNA, 21 nt, synthetic construct
  source 1..21: mol_type = other RNA
gacgagctttacctaaatcta

SEQ ID NO: 267 - RNA, 21 nt, synthetic construct
  source 1..21: mol_type = other RNA
ctttacctaaatctggtgcta

SEQ ID NO: 268 - RNA, 21 nt, synthetic construct
  source 1..21: mol_type = other RNA
ctaaatctggtgctggaataa

SEQ ID NO: 269 - RNA, 21 nt, synthetic construct
  source 1..21: mol_type = other RNA
gctggaatatgtgcccgagaa

SEQ ID NO: 270 - RNA, 21 nt, synthetic construct
  source 1..21: mol_type = other RNA
tatgtgcccgagacagtgtaa

SEQ ID NO: 271 - RNA, 21 nt, synthetic construct
  source 1..21: mol_type = other RNA
cccgagacagtgtaccgggta

SEQ ID NO: 272 - RNA, 21 nt, synthetic construct
  source 1..21: mol_type = other RNA
ttcaccaaggccaagttgaca

SEQ ID NO: 273 - RNA, 21 nt, synthetic construct
  source 1..21: mol_type = other RNA
ggccaagttgaccatccctaa

SEQ ID NO: 274 - RNA, 21 nt, synthetic construct
  source 1..21: mol_type = other RNA
ttgaccatccctatcctctaa

SEQ ID NO: 275 - RNA, 21 nt, synthetic construct
  source 1..21: mol_type = other RNA
atccctatcctctatgtcaaa

SEQ ID NO: 276 - RNA, 21 nt, synthetic construct
  source 1..21: mol_type = other RNA
ctctatgtcaaggtgtacata

SEQ ID NO: 277 - RNA, 21 nt, synthetic construct
  source 1..21: mol_type = other RNA
gtcaaggtgtacatgtaccaa

SEQ ID NO: 278 - RNA, 21 nt, synthetic construct
  source 1..21: mol_type = other RNA
cgccacttcaccaaggccaaa

SEQ ID NO: 279 - RNA, 21 nt, synthetic construct
  source 1..21: mol_type = other RNA
taccagctcttccgcagctta

SEQ ID NO: 280 - RNA, 21 nt, synthetic construct
  source 1..21: mol_type = other RNA
cttccgcagcttggcctacaa

SEQ ID NO: 281 - RNA, 21 nt, synthetic construct
  source 1..21: mol_type = other RNA
ggcgtgtgtcaccgcgacata

SEQ ID NO: 282 - RNA, 21 nt, synthetic construct
  source 1..21: mol_type = other RNA
gtgtacatgtaccagctctta

SEQ ID NO: 283 - RNA, 21 nt, synthetic construct
  source 1..21: mol_type = other RNA
tgtcaccgcgacatcaagcca

SEQ ID NO: 284 - RNA, 21 nt, synthetic construct
  source 1..21: mol_type = other RNA
ttggcctacatccactcccaa

SEQ ID NO: 285 - RNA, 21 nt, synthetic construct
  source 1..21: mol_type = other RNA
cagtgcaaagcagttggtcca

SEQ ID NO: 286 - RNA, 21 nt, synthetic construct
  source 1..21: mol_type = other RNA
accctgacactgctgtcctca

SEQ ID NO: 287 - RNA, 21 nt, synthetic construct
  source 1..21: mol_type = other RNA
cactgctgtcctcaagctcta

SEQ ID NO: 288 - RNA, 21 nt, synthetic construct
  source 1..21: mol_type = other RNA
gagcccaatgtctcctacata

SEQ ID NO: 289 - RNA, 21 nt, synthetic construct
  source 1..21: mol_type = other RNA
aatgtctcctacatctgttca

SEQ ID NO: 290 - RNA, 21 nt, synthetic construct
  source 1..21: mol_type = other RNA
tacatctgttctcgctactaa

SEQ ID NO: 291 - RNA, 21 nt, synthetic construct
  source 1..21: mol_type = other RNA
tgcgattttggcagtgcaaaa

SEQ ID NO: 292 - RNA, 21 nt, synthetic construct
  source 1..21: mol_type = other RNA
gttctcgctactaccgggcca

SEQ ID NO: 293 - RNA, 21 nt, synthetic construct
  source 1..21: mol_type = other RNA
agctcatctttggagccacta

SEQ ID NO: 294 - RNA, 21 nt, synthetic construct
  source 1..21: mol_type = other RNA
tctttggagccactgattaca

SEQ ID NO: 295 - RNA, 21 nt, synthetic construct
  source 1..21: mol_type = other RNA
gagccactgattacacctcaa

SEQ ID NO: 296 - RNA, 21 nt, synthetic construct
  source 1..21: mol_type = other RNA
tgattacacctcatccatcga

SEQ ID NO: 297 - RNA, 21 nt, synthetic construct
  source 1..21: mol_type = other RNA
cacctcatccatcgatgttta

SEQ ID NO: 298 - RNA, 21 nt, synthetic construct
  source 1..21: mol_type = other RNA
atccatcgatgtttggtcaga

SEQ ID NO: 299 - RNA, 21 nt, synthetic construct
  source 1..21: mol_type = other RNA
gctggctgtgtactggcagaa

SEQ ID NO: 300 - RNA, 21 nt, synthetic construct
  source 1..21: mol_type = other RNA
tactggcagagctcctcttga

SEQ ID NO: 301 - RNA, 21 nt, synthetic construct
  source 1..21: mol_type = other RNA
cttgggccagcccatcttcca

SEQ ID NO: 302 - RNA, 21 nt, synthetic construct
  source 1..21: mol_type = other RNA
cagctggtggagatcatcaaa

SEQ ID NO: 303 - RNA, 21 nt, synthetic construct
  source 1..21: mol_type = other RNA
gtggagatcatcaaggtgcta

SEQ ID NO: 304 - RNA, 21 nt, synthetic construct
  source 1..21: mol_type = other RNA
aaggtgctgggaacaccaaca

SEQ ID NO: 305 - RNA, 21 nt, synthetic construct
  source 1..21: mol_type = other RNA
tgggaacaccaacccgggaaa

SEQ ID NO: 306 - RNA, 21 nt, synthetic construct
  source 1..21: mol_type = other RNA
ccaacccgggaacaaatccga

SEQ ID NO: 307 - RNA, 21 nt, synthetic construct
  source 1..21: mol_type = other RNA
cgggaacaaatccgagagata

SEQ ID NO: 308 - RNA, 21 nt, synthetic construct
  source 1..21: mol_type = other RNA
acacggagttcaagttcccta

SEQ ID NO: 309 - RNA, 21 nt, synthetic construct
  source 1..21: mol_type = other RNA
gttcaagttccctcagattaa

SEQ ID NO: 310 - RNA, 21 nt, synthetic construct
  source 1..21: mol_type = other RNA
gttccctcagattaaagctca

SEQ ID NO: 311 - RNA, 21 nt, synthetic construct
  source 1..21: mol_type = other RNA
ctggacaaaggtgttcaaata

SEQ ID NO: 312 - RNA, 21 nt, synthetic construct
  source 1..21: mol_type = other RNA
aaaggtgttcaaatctcgaaa

SEQ ID NO: 313 - RNA, 21 nt, synthetic construct
  source 1..21: mol_type = other RNA
gttcaaatctcgaacgccgca

SEQ ID NO: 314 - RNA, 21 nt, synthetic construct
  source 1..21: mol_type = other RNA
aggccatcgcgctctgctcta

SEQ ID NO: 315 - RNA, 21 nt, synthetic construct
  source 1..21: mol_type = other RNA
tcgcgctctgctctagcctga

SEQ ID NO: 316 - RNA, 21 nt, synthetic construct
  source 1..21: mol_type = other RNA
tctagcctgctggagtacaca

SEQ ID NO: 317 - RNA, 21 nt, synthetic construct
  source 1..21: mol_type = other RNA
gtgcgcacagcttctttgata

SEQ ID NO: 318 - RNA, 21 nt, synthetic construct
  source 1..21: mol_type = other RNA
acagcttctttgatgaactga

SEQ ID NO: 319 - RNA, 21 nt, synthetic construct
  source 1..21: mol_type = other RNA
tttgatgaactgcgatgtcta

SEQ ID NO: 320 - RNA, 21 nt, synthetic construct
  source 1..21: mol_type = other RNA
gaactgcgatgtctgggaaca

SEQ ID NO: 321 - RNA, 21 nt, synthetic construct
  source 1..21: mol_type = other RNA
cgatgtctgggaacccagcta

SEQ ID NO: 322 - RNA, 21 nt, synthetic construct
  source 1..21: mol_type = other RNA
acccagctgcctaacaaccga

SEQ ID NO: 323 - RNA, 21 nt, synthetic construct
  source 1..21: mol_type = other RNA
tgcctaacaaccgcccactta

SEQ ID NO: 324 - RNA, 21 nt, synthetic construct
  source 1..21: mol_type = other RNA
ctctcttcaacttcagtgcta

SEQ ID NO: 325 - RNA, 21 nt, synthetic construct
  source 1..21: mol_type = other RNA
caacttcagtgctggtgaaca

SEQ ID NO: 326 - RNA, 21 nt, synthetic construct
  source 1..21: mol_type = other RNA
agtgctggtgaactctccata

SEQ ID NO: 327 - RNA, 21 nt, synthetic construct
  source 1..21: mol_type = other RNA
ggtgaactctccatccaacca

SEQ ID NO: 328 - RNA, 21 nt, synthetic construct
  source 1..21: mol_type = other RNA
tccatccaaccgtctctcaaa

SEQ ID NO: 329 - RNA, 21 nt, synthetic construct
  source 1..21: mol_type = other RNA
caaccgtctctcaacgccata

SEQ ID NO: 330 - RNA, 21 nt, synthetic construct
  source 1..21: mol_type = other RNA
tctctcaacgccattctcata

SEQ ID NO: 331 - RNA, 21 nt, synthetic construct
  source 1..21: mol_type = other RNA
acgccattctcatccctccta

SEQ ID NO: 332 - RNA, 21 nt, synthetic construct
  source 1..21: mol_type = other RNA
gtcctcacaagctttaactga

SEQ ID NO: 333 - RNA, 21 nt, synthetic construct
  source 1..21: mol_type = other RNA
tctcatccctcctcacttgaa

SEQ ID NO: 334 - RNA, 21 nt, synthetic construct
  source 1..21: mol_type = other RNA
acaagctttaactgagactca

SEQ ID NO: 335 - RNA, 21 nt, synthetic construct
  source 1..21: mol_type = other RNA
tttaactgagactccgaccaa

SEQ ID NO: 336 - RNA, 21 nt, synthetic construct
  source 1..21: mol_type = other RNA
ccagctcagactggcagtcga

SEQ ID NO: 337 - RNA, 21 nt, synthetic construct
  source 1..21: mol_type = other RNA
tggcagtcgaccgatgccaca

SEQ ID NO: 338 - RNA, 21 nt, synthetic construct
  source 1..21: mol_type = other RNA
tcgaccgatgccacacctaca

SEQ ID NO: 339 - RNA, 21 nt, synthetic construct
  source 1..21: mol_type = other RNA
atgccacacctaccctcacta

SEQ ID NO: 340 - RNA, 21 nt, synthetic construct
  source 1..21: mol_type = other RNA
acctaccctcactaactccta

SEQ ID NO: 341 - RNA, 21 nt, synthetic construct
  source 1..21: mol_type = other RNA
cctcactaactcctcctgaga

SEQ ID NO: 342 - RNA, 21 nt, synthetic construct
  source 1..21: mol_type = other RNA
caccaagcacccttccactta

SEQ ID NO: 343 - RNA, 21 nt, synthetic construct
  source 1..21: mol_type = other RNA
acccttccacttccatctgga

SEQ ID NO: 344 - RNA, 21 nt, synthetic construct
  source 1..21: mol_type = other RNA
ccatagcccatcaagctccta

SEQ ID NO: 345 - RNA, 21 nt, synthetic construct
  source 1..21: mol_type = other RNA
gcagaggtaaatgagtcccta

SEQ ID NO: 346 - RNA, 21 nt, synthetic construct
  source 1..21: mol_type = other RNA
cccatcaagctcctgccctga

SEQ ID NO: 347 - RNA, 21 nt, synthetic construct
  source 1..21: mol_type = other RNA
tccctccctcaccagcctcaa

SEQ ID NO: 348 - RNA, 21 nt, synthetic construct
  source 1..21: mol_type = other RNA
ctgtggtgggctttttaagaa

SEQ ID NO: 349 - RNA, 21 nt, synthetic construct
  source 1..21: mol_type = other RNA
tgggctttttaagaggattta

SEQ ID NO: 350 - RNA, 21 nt, synthetic construct
  source 1..21: mol_type = other RNA
taagaggattttaactggtta

SEQ ID NO: 351 - RNA, 21 nt, synthetic construct
  source 1..21: mol_type = other RNA
agggaagagaaggacagggta

SEQ ID NO: 352 - RNA, 21 nt, synthetic construct
  source 1..21: mol_type = other RNA
cctgtgtcccttgtaaataga

SEQ ID NO: 353 - RNA, 21 nt, synthetic construct
  source 1..21: mol_type = other RNA
tctcctcttcccttccctgga

SEQ ID NO: 354 - RNA, 21 nt, synthetic construct
  source 1..21: mol_type = other RNA
cgggtgtaaatagattgttaa

SEQ ID NO: 355 - RNA, 21 nt, synthetic construct
  source 1..21: mol_type = other RNA
ttgtaaatagaaccagcccaa

SEQ ID NO: 356 - RNA, 21 nt, synthetic construct
  source 1..21: mol_type = other RNA
cttaaagaaaacgtcgattca

SEQ ID NO: 357 - RNA, 21 nt, synthetic construct
  source 1..21: mol_type = other RNA
gaaaacgtcgattcgcaccga

SEQ ID NO: 358 - RNA, 21 nt, synthetic construct
  source 1..21: mol_type = other RNA
gtcgattcgcaccgtccaaca

SEQ ID NO: 359 - RNA, 21 nt, synthetic construct
  source 1..21: mol_type = other RNA
tcgcaccgtccaacctggcca

SEQ ID NO: 360 - RNA, 21 nt, synthetic construct
  source 1..21: mol_type = other RNA
caaggtctactccctcctcaa

SEQ ID NO: 361 - RNA, 21 nt, synthetic construct
  source 1..21: mol_type = other RNA
gctcctgatgtcttagtttca

SEQ ID NO: 362 - RNA, 21 nt, synthetic construct
  source 1..21: mol_type = other RNA
atgtcttagtttccacagtaa

SEQ ID NO: 363 - RNA, 21 nt, synthetic construct
  source 1..21: mol_type = other RNA
cctgtgtacagacctccgtta

SEQ ID NO: 364 - RNA, 21 nt, synthetic construct
  source 1..21: mol_type = other RNA
acagacctccgttcaataaaa

SEQ ID NO: 365 - RNA, 21 nt, synthetic construct
  source 1..21: mol_type = other RNA
ctccgttcaataaattattga

SEQ ID NO: 366 - RNA, 21 nt, synthetic construct
  source 1..21: mol_type = other RNA
tagtttccacagtaaggttta

SEQ ID NO: 367 - RNA, 21 nt, synthetic construct
  source 1..21: mol_type = other RNA
ccacagtaaggtttgcctgta

SEQ ID NO: 368 - RNA, 21 nt, synthetic construct
  source 1..21: mol_type = other RNA
aaggtttgcctgtgtacagaa

SEQ ID NO: 369 - RNA, 21 nt, synthetic construct
  source 1..21: mol_type = other RNA
tcaataaattattggcatgaa

SEQ ID NO: 370 - RNA, 23 nt, synthetic construct
  source 1..23: mol_type = other RNA
tgctacgactgtggtcaccttcc

SEQ ID NO: 371 - RNA, 23 nt, synthetic construct
  source 1..23: mol_type = other RNA
tagagtggctacgactgtggtca

SEQ ID NO: 372 - RNA, 23 nt, synthetic construct
  source 1..23: mol_type = other RNA
tttggcctagagtggctacgact

SEQ ID NO: 373 - RNA, 23 nt, synthetic construct
  source 1..23: mol_type = other RNA
tagccacttcttgggagcgctct

SEQ ID NO: 374 - RNA, 23 nt, synthetic construct
  source 1..23: mol_type = other RNA
tcgtgtaagccacttcttgggag

SEQ ID NO: 375 - RNA, 23 nt, synthetic construct
  source 1..23: mol_type = other RNA
tactgtggtcaccttcccgctgt

SEQ ID NO: 376 - RNA, 23 nt, synthetic construct
  source 1..23: mol_type = other RNA
tctttgatgtccgtgtaagccac

SEQ ID NO: 377 - RNA, 23 nt, synthetic construct
  source 1..23: mol_type = other RNA
tttgccaatcactttgatgtccg

SEQ ID NO: 378 - RNA, 23 nt, synthetic construct
  source 1..23: mol_type = other RNA
taaatgagccattgccaatcact

SEQ ID NO: 379 - RNA, 23 nt, synthetic construct
  source 1..23: mol_type = other RNA
tgcgactagttccctggtctctg

SEQ ID NO: 380 - RNA, 23 nt, synthetic construct
  source 1..23: mol_type = other RNA
tttgatggcgactagttccctgg

SEQ ID NO: 381 - RNA, 23 nt, synthetic construct
  source 1..23: mol_type = other RNA
taccttcttgatggcgactagtt

SEQ ID NO: 382 - RNA, 23 nt, synthetic construct
  source 1..23: mol_type = other RNA
ttggagaaccttcttgatggcga

SEQ ID NO: 383 - RNA, 23 nt, synthetic construct
  source 1..23: mol_type = other RNA
tttgtcctggagaaccttcttga

SEQ ID NO: 384 - RNA, 23 nt, synthetic construct
  source 1..23: mol_type = other RNA
ttcttgaacctcttgtcctggag

SEQ ID NO: 385 - RNA, 23 nt, synthetic construct
  source 1..23: mol_type = other RNA
tagctctcggttcttgaacctct

SEQ ID NO: 386 - RNA, 23 nt, synthetic construct
  source 1..23: mol_type = other RNA
tatctgcagctctcggttcttga

SEQ ID NO: 387 - RNA, 23 nt, synthetic construct
  source 1..23: mol_type = other RNA
tcgcatgatctgcagctctcggt

SEQ ID NO: 388 - RNA, 23 nt, synthetic construct
  source 1..23: mol_type = other RNA
tagcttacgcatgatctgcagct

SEQ ID NO: 389 - RNA, 23 nt, synthetic construct
  source 1..23: mol_type = other RNA
tagtggtccagcttacgcatgat

SEQ ID NO: 390 - RNA, 23 nt, synthetic construct
  source 1..23: mol_type = other RNA
ttcagcctcacaatattgcagtg

SEQ ID NO: 391 - RNA, 23 nt, synthetic construct
  source 1..23: mol_type = other RNA
taaaagtatctcagcctcacaat

SEQ ID NO: 392 - RNA, 23 nt, synthetic construct
  source 1..23: mol_type = other RNA
tagtagaaaaagtatctcagcct

SEQ ID NO: 393 - RNA, 23 nt, synthetic construct
  source 1..23: mol_type = other RNA
tcactggagtagaaaaagtatct

SEQ ID NO: 394 - RNA, 23 nt, synthetic construct
  source 1..23: mol_type = other RNA
ttctcgccactggagtagaaaaa

SEQ ID NO: 395 - RNA, 23 nt, synthetic construct
  source 1..23: mol_type = other RNA
ttctttcttctcgccactggagt

SEQ ID NO: 396 - RNA, 23 nt, synthetic construct
  source 1..23: mol_type = other RNA
tagctcgtctttcttctcgccac

SEQ ID NO: 397 - RNA, 23 nt, synthetic construct
  source 1..23: mol_type = other RNA
taggtaaagctcgtctttcttct

SEQ ID NO: 398 - RNA, 23 nt, synthetic construct
  source 1..23: mol_type = other RNA
ttcacaatattgcagtggtccag

SEQ ID NO: 399 - RNA, 23 nt, synthetic construct
  source 1..23: mol_type = other RNA
tagatttaggtaaagctcgtctt

SEQ ID NO: 400 - RNA, 23 nt, synthetic construct
  source 1..23: mol_type = other RNA
tagcaccagatttaggtaaagct

SEQ ID NO: 401 - RNA, 23 nt, synthetic construct
  source 1..23: mol_type = other RNA
ttattccagcaccagatttaggt

SEQ ID NO: 402 - RNA, 23 nt, synthetic construct
  source 1..23: mol_type = other RNA
ttctcgggcacatattccagcac

SEQ ID NO: 403 - RNA, 23 nt, synthetic construct
  source 1..23: mol_type = other RNA
ttacactgtctcgggcacatatt

SEQ ID NO: 404 - RNA, 23 nt, synthetic construct
  source 1..23: mol_type = other RNA
tacccggtacactgtctcgggca

SEQ ID NO: 405 - RNA, 23 nt, synthetic construct
  source 1..23: mol_type = other RNA
tgtcaacttggccttggtgaagt

SEQ ID NO: 406 - RNA, 23 nt, synthetic construct
  source 1..23: mol_type = other RNA
ttagggatggtcaacttggcctt

SEQ ID NO: 407 - RNA, 23 nt, synthetic construct
  source 1..23: mol_type = other RNA
ttagaggatagggatggtcaact

SEQ ID NO: 408 - RNA, 23 nt, synthetic construct
  source 1..23: mol_type = other RNA
tttgacatagaggatagggatgg

SEQ ID NO: 409 - RNA, 23 nt, synthetic construct
  source 1..23: mol_type = other RNA
tatgtacaccttgacatagagga

SEQ ID NO: 410 - RNA, 23 nt, synthetic construct
  source 1..23: mol_type = other RNA
ttggtacatgtacaccttgacat

SEQ ID NO: 411 - RNA, 23 nt, synthetic construct
  source 1..23: mol_type = other RNA
tttggccttggtgaagtggcggg

SEQ ID NO: 412 - RNA, 23 nt, synthetic construct
  source 1..23: mol_type = other RNA
taagctgcggaagagctggtaca

SEQ ID NO: 413 - RNA, 23 nt, synthetic construct
  source 1..23: mol_type = other RNA
ttgtaggccaagctgcggaagag

SEQ ID NO: 414 - RNA, 23 nt, synthetic construct
  source 1..23: mol_type = other RNA
tatgtcgcggtgacacacgccct

SEQ ID NO: 415 - RNA, 23 nt, synthetic construct
  source 1..23: mol_type = other RNA
taagagctggtacatgtacacct

SEQ ID NO: 416 - RNA, 23 nt, synthetic construct
  source 1..23: mol_type = other RNA
tggcttgatgtcgcggtgacaca

SEQ ID NO: 417 - RNA, 23 nt, synthetic construct
  source 1..23: mol_type = other RNA
ttgggagtggatgtaggccaagc

SEQ ID NO: 418 - RNA, 23 nt, synthetic construct
  source 1..23: mol_type = other RNA
tggaccaactgctttgcactgcc

SEQ ID NO: 419 - RNA, 23 nt, synthetic construct
  source 1..23: mol_type = other RNA
tgaggacagcagtgtcagggtcc

SEQ ID NO: 420 - RNA, 23 nt, synthetic construct
  source 1..23: mol_type = other RNA
tagagcttgaggacagcagtgtc

SEQ ID NO: 421 - RNA, 23 nt, synthetic construct
  source 1..23: mol_type = other RNA
tatgtaggagacattgggctccc

SEQ ID NO: 422 - RNA, 23 nt, synthetic construct
  source 1..23: mol_type = other RNA
tgaacagatgtaggagacattgg

SEQ ID NO: 423 - RNA, 23 nt, synthetic construct
  source 1..23: mol_type = other RNA
ttagtagcgagaacagatgtagg

SEQ ID NO: 424 - RNA, 23 nt, synthetic construct
  source 1..23: mol_type = other RNA
ttttgcactgccaaaatcgcaga

SEQ ID NO: 425 - RNA, 23 nt, synthetic construct
  source 1..23: mol_type = other RNA
tggcccggtagtagcgagaacag

SEQ ID NO: 426 - RNA, 23 nt, synthetic construct
  source 1..23: mol_type = other RNA
tagtggctccaaagatgagctct

SEQ ID NO: 427 - RNA, 23 nt, synthetic construct
  source 1..23: mol_type = other RNA
tgtaatcagtggctccaaagatg

SEQ ID NO: 428 - RNA, 23 nt, synthetic construct
  source 1..23: mol_type = other RNA
ttgaggtgtaatcagtggctcca

SEQ ID NO: 429 - RNA, 23 nt, synthetic construct
  source 1..23: mol_type = other RNA
tcgatggatgaggtgtaatcagt

SEQ ID NO: 430 - RNA, 23 nt, synthetic construct
  source 1..23: mol_type = other RNA
taaacatcgatggatgaggtgta

SEQ ID NO: 431 - RNA, 23 nt, synthetic construct
  source 1..23: mol_type = other RNA
tctgaccaaacatcgatggatga

SEQ ID NO: 432 - RNA, 23 nt, synthetic construct
  source 1..23: mol_type = other RNA
ttctgccagtacacagccagctg

SEQ ID NO: 433 - RNA, 23 nt, synthetic construct
  source 1..23: mol_type = other RNA
tcaagaggagctctgccagtaca

SEQ ID NO: 434 - RNA, 23 nt, synthetic construct
  source 1..23: mol_type = other RNA
tggaagatgggctggcccaagag

SEQ ID NO: 435 - RNA, 23 nt, synthetic construct
  source 1..23: mol_type = other RNA
tttgatgatctccaccagctggt

SEQ ID NO: 436 - RNA, 23 nt, synthetic construct
  source 1..23: mol_type = other RNA
tagcaccttgatgatctccacca

SEQ ID NO: 437 - RNA, 23 nt, synthetic construct
  source 1..23: mol_type = other RNA
tgttggtgttcccagcaccttga

SEQ ID NO: 438 - RNA, 23 nt, synthetic construct
  source 1..23: mol_type = other RNA
tttcccgggttggtgttcccagc

SEQ ID NO: 439 - RNA, 23 nt, synthetic construct
  source 1..23: mol_type = other RNA
tcggatttgttcccgggttggtg

SEQ ID NO: 440 - RNA, 23 nt, synthetic construct
  source 1..23: mol_type = other RNA
tatctctcggatttgttcccggg

SEQ ID NO: 441 - RNA, 23 nt, synthetic construct
  source 1..23: mol_type = other RNA
tagggaacttgaactccgtgtag

SEQ ID NO: 442 - RNA, 23 nt, synthetic construct
  source 1..23: mol_type = other RNA
ttaatctgagggaacttgaactc

SEQ ID NO: 443 - RNA, 23 nt, synthetic construct
  source 1..23: mol_type = other RNA
tgagctttaatctgagggaactt

SEQ ID NO: 444 - RNA, 23 nt, synthetic construct
  source 1..23: mol_type = other RNA
tatttgaacacctttgtccaggg

SEQ ID NO: 445 - RNA, 23 nt, synthetic construct
  source 1..23: mol_type = other RNA
tttcgagatttgaacacctttgt

SEQ ID NO: 446 - RNA, 23 nt, synthetic construct
  source 1..23: mol_type = other RNA
tgcggcgttcgagatttgaacac

SEQ ID NO: 447 - RNA, 23 nt, synthetic construct
  source 1..23: mol_type = other RNA
tagagcagagcgcgatggcctct

SEQ ID NO: 448 - RNA, 23 nt, synthetic construct
  source 1..23: mol_type = other RNA
tcaggctagagcagagcgcgatg

SEQ ID NO: 449 - RNA, 23 nt, synthetic construct
  source 1..23: mol_type = other RNA
tgtgtactccagcaggctagagc

SEQ ID NO: 450 - RNA, 23 nt, synthetic construct
  source 1..23: mol_type = other RNA
tatcaaagaagctgtgcgcacag

SEQ ID NO: 451 - RNA, 23 nt, synthetic construct
  source 1..23: mol_type = other RNA
tcagttcatcaaagaagctgtgc

SEQ ID NO: 452 - RNA, 23 nt, synthetic construct
  source 1..23: mol_type = other RNA
tagacatcgcagttcatcaaaga

SEQ ID NO: 453 - RNA, 23 nt, synthetic construct
  source 1..23: mol_type = other RNA
tgttcccagacatcgcagttcat

SEQ ID NO: 454 - RNA, 23 nt, synthetic construct
  source 1..23: mol_type = other RNA
tagctgggttcccagacatcgca

SEQ ID NO: 455 - RNA, 23 nt, synthetic construct
  source 1..23: mol_type = other RNA
tcggttgttaggcagctgggttc

SEQ ID NO: 456 - RNA, 23 nt, synthetic construct
  source 1..23: mol_type = other RNA
taagtgggcggttgttaggcagc

SEQ ID NO: 457 - RNA, 23 nt, synthetic construct
  source 1..23: mol_type = other RNA
tagcactgaagttgaagagaggg

SEQ ID NO: 458 - RNA, 23 nt, synthetic construct
  source 1..23: mol_type = other RNA
tgttcaccagcactgaagttgaa

SEQ ID NO: 459 - RNA, 23 nt, synthetic construct
  source 1..23: mol_type = other RNA
tatggagagttcaccagcactga

SEQ ID NO: 460 - RNA, 23 nt, synthetic construct
  source 1..23: mol_type = other RNA
tggttggatggagagttcaccag

SEQ ID NO: 461 - RNA, 23 nt, synthetic construct
  source 1..23: mol_type = other RNA
tttgagagacggttggatggaga

SEQ ID NO: 462 - RNA, 23 nt, synthetic construct
  source 1..23: mol_type = other RNA
tatggcgttgagagacggttgga

SEQ ID NO: 463 - RNA, 23 nt, synthetic construct
  source 1..23: mol_type = other RNA
tatgagaatggcgttgagagacg

SEQ ID NO: 464 - RNA, 23 nt, synthetic construct
  source 1..23: mol_type = other RNA
taggagggatgagaatggcgttg

SEQ ID NO: 465 - RNA, 23 nt, synthetic construct
  source 1..23: mol_type = other RNA
tcagttaaagcttgtgaggacgg

SEQ ID NO: 466 - RNA, 23 nt, synthetic construct
  source 1..23: mol_type = other RNA
ttcaagtgaggagggatgagaat

SEQ ID NO: 467 - RNA, 23 nt, synthetic construct
  source 1..23: mol_type = other RNA
tgagtctcagttaaagcttgtga

SEQ ID NO: 468 - RNA, 23 nt, synthetic construct
  source 1..23: mol_type = other RNA
ttggtcggagtctcagttaaagc

SEQ ID NO: 469 - RNA, 23 nt, synthetic construct
  source 1..23: mol_type = other RNA
tcgactgccagtctgagctggtc

SEQ ID NO: 470 - RNA, 23 nt, synthetic construct
  source 1..23: mol_type = other RNA
tgtggcatcggtcgactgccagt

SEQ ID NO: 471 - RNA, 23 nt, synthetic construct
  source 1..23: mol_type = other RNA
tgtaggtgtggcatcggtcgact

SEQ ID NO: 472 - RNA, 23 nt, synthetic construct
  source 1..23: mol_type = other RNA
tagtgagggtaggtgtggcatcg

SEQ ID NO: 473 - RNA, 23 nt, synthetic construct
  source 1..23: mol_type = other RNA
taggagttagtgagggtaggtgt

SEQ ID NO: 474 - RNA, 23 nt, synthetic construct
  source 1..23: mol_type = other RNA
tctcaggaggagttagtgagggt

SEQ ID NO: 475 - RNA, 23 nt, synthetic construct
  source 1..23: mol_type = other RNA
taagtggaagggtgcttggtggg

SEQ ID NO: 476 - RNA, 23 nt, synthetic construct
  source 1..23: mol_type = other RNA
tccagatggaagtggaagggtgc

SEQ ID NO: 477 - RNA, 23 nt, synthetic construct
  source 1..23: mol_type = other RNA
taggagcttgatgggctatggcc

SEQ ID NO: 478 - RNA, 23 nt, synthetic construct
  source 1..23: mol_type = other RNA
tagggactcatttacctctgccc

SEQ ID NO: 479 - RNA, 23 nt, synthetic construct
  source 1..23: mol_type = other RNA
tcagggcaggagcttgatgggct

SEQ ID NO: 480 - RNA, 23 nt, synthetic construct
  source 1..23: mol_type = other RNA
ttgaggctggtgagggagggact

SEQ ID NO: 481 - RNA, 23 nt, synthetic construct
  source 1..23: mol_type = other RNA
ttcttaaaaagcccaccacaggg

SEQ ID NO: 482 - RNA, 23 nt, synthetic construct
  source 1..23: mol_type = other RNA
taaatcctcttaaaaagcccacc

SEQ ID NO: 483 - RNA, 23 nt, synthetic construct
  source 1..23: mol_type = other RNA
taaccagttaaaatcctcttaaa

SEQ ID NO: 484 - RNA, 23 nt, synthetic construct
  source 1..23: mol_type = other RNA
taccctgtccttctcttccctcc

SEQ ID NO: 485 - RNA, 23 nt, synthetic construct
  source 1..23: mol_type = other RNA
tctatttacaagggacacaggag

SEQ ID NO: 486 - RNA, 23 nt, synthetic construct
  source 1..23: mol_type = other RNA
tccagggaagggaagaggagacg

SEQ ID NO: 487 - RNA, 23 nt, synthetic construct
  source 1..23: mol_type = other RNA
ttaacaatctatttacacccggg

SEQ ID NO: 488 - RNA, 23 nt, synthetic construct
  source 1..23: mol_type = other RNA
ttgggctggttctatttacaagg

SEQ ID NO: 489 - RNA, 23 nt, synthetic construct
  source 1..23: mol_type = other RNA
tgaatcgacgttttctttaagaa

SEQ ID NO: 490 - RNA, 23 nt, synthetic construct
  source 1..23: mol_type = other RNA
tcggtgcgaatcgacgttttctt

SEQ ID NO: 491 - RNA, 23 nt, synthetic construct
  source 1..23: mol_type = other RNA
tgttggacggtgcgaatcgacgt

SEQ ID NO: 492 - RNA, 23 nt, synthetic construct
  source 1..23: mol_type = other RNA
tggccaggttggacggtgcgaat

SEQ ID NO: 493 - RNA, 23 nt, synthetic construct
  source 1..23: mol_type = other RNA
ttgaggagggagtagaccttggg

SEQ ID NO: 494 - RNA, 23 nt, synthetic construct
  source 1..23: mol_type = other RNA
tgaaactaagacatcaggagctc

SEQ ID NO: 495 - RNA, 23 nt, synthetic construct
  source 1..23: mol_type = other RNA
ttactgtggaaactaagacatca

SEQ ID NO: 496 - RNA, 23 nt, synthetic construct
  source 1..23: mol_type = other RNA
taacggaggtctgtacacaggca

SEQ ID NO: 497 - RNA, 23 nt, synthetic construct
  source 1..23: mol_type = other RNA
ttttattgaacggaggtctgtac

SEQ ID NO: 498 - RNA, 23 nt, synthetic construct
  source 1..23: mol_type = other RNA
tcaataatttattgaacggaggt

SEQ ID NO: 499 - RNA, 23 nt, synthetic construct
  source 1..23: mol_type = other RNA
taaaccttactgtggaaactaag

SEQ ID NO: 500 - RNA, 23 nt, synthetic construct
  source 1..23: mol_type = other RNA
tacaggcaaaccttactgtggaa

SEQ ID NO: 501 - RNA, 23 nt, synthetic construct
  source 1..23: mol_type = other RNA
ttctgtacacaggcaaaccttac

SEQ ID NO: 502 - RNA, 23 nt, synthetic construct
  source 1..23: mol_type = other RNA
ttcatgccaataatttattgaac

SEQ ID NO: 503 - RNA, 21 nt, synthetic construct
  source 1..21: mol_type = other RNA
  modified_base 1: mod_base = OTHER; note = 2'-O-methyladenosine-3'-phosphorothioate
  modified_base 2: mod_base = OTHER; note = 2'-O-methyladenosine-3'-phosphorothioate
  modified_base 3: mod_base = OTHER; note = 2'-O-methylguanosine-3'-phosphate
  modified_base 4: mod_base = OTHER; note = 2'-O-methylguanosine-3'-phosphate
  modified_base 5: mod_base = OTHER; note = 2'-O-methyluridine-3'-phosphate
  modified_base 6: mod_base = OTHER; note = 2'-O-hexadecyl-guanosine-3'-phosphate
  modified_base 7: mod_base = OTHER; note = 2'-deoxy-2'-fluoroadenosine-3'-phosphate
  modified_base 8: mod_base = OTHER; note = 2'-O-methylcytidine-3'-phosphate
  modified_base 9: mod_base = OTHER; note = 2'-deoxy-2'-fluorocytidine-3'-phosphate
  modified_base 10: mod_base = OTHER; note = 2'-deoxy-2'-fluoroadenosine-3'-phosphate
  modified_base 11: mod_base = OTHER; note = 2'-deoxy-2'-fluorocytidine-3'-phosphate
  modified_base 12: mod_base = OTHER; note = 2'-O-methyladenosine-3'-phosphate
  modified_base 13: mod_base = OTHER; note = 2'-O-methylguanosine-3'-phosphate
  modified_base 14: mod_base = OTHER; note = 2'-O-methyluridine-3'-phosphate
  modified_base 15: mod_base = OTHER; note = 2'-O-methylcytidine-3'-phosphate
  modified_base 16: mod_base = OTHER; note = 2'-O-methylguanosine-3'-phosphate
  modified_base 17: mod_base = OTHER; note = 2'-O-methyluridine-3'-phosphate
  modified_base 18: mod_base = OTHER; note = 2'-O-methyladenosine-3'-phosphate
  modified_base 19: mod_base = OTHER; note = 2'-O-methylguanosine-3'-phosphorothioate
  modified_base 20: mod_base = OTHER; note = 2'-O-methylcytidine-3'-phosphorothioate
  modified_base 21: mod_base = OTHER; note = 2'-O-methyladenosine
aaggtgaccacagtcgtagca

SEQ ID NO: 504 - RNA, 21 nt, synthetic construct
  source 1..21: mol_type = other RNA
  modified_base 1: mod_base = OTHER; note = 2'-O-methyladenosine-3'-phosphorothioate
  modified_base 2: mod_base = OTHER; note = 2'-O-methylcytidine-3'-phosphorothioate
  modified_base 3: mod_base = OTHER; note = 2'-O-methylcytidine-3'-phosphate
  modified_base 4: mod_base = OTHER; note = 2'-O-methyladenosine-3'-phosphate
  modified_base 5: mod_base = OTHER; note = 2'-O-methylcytidine-3'-phosphate
  modified_base 6: mod_base = OTHER; note = 2'-O-hexadecyl-adenosine-3'-phosphate
  modified_base 7: mod_base = OTHER; note = 2'-deoxy-2'-fluoroguanosine-3'-phosphate
  modified_base 8: mod_base = OTHER; note = 2'-O-methyluridine-3'-phosphate
  modified_base 9: mod_base = OTHER; note = 2'-deoxy-2'-fluorocytidine-3'-phosphate
  modified_base 10: mod_base = OTHER; note = 2'-deoxy-2'-fluoroguanosine-3'-phosphate
  modified_base 11: mod_base = OTHER; note = 2'-deoxy-2'-fluorouridine-3'-phosphate
  modified_base 12: mod_base = OTHER; note = 2'-O-methyladenosine-3'-phosphate
  modified_base 13: mod_base = OTHER; note = 2'-O-methylguanosine-3'-phosphate
  modified_base 14: mod_base = OTHER; note = 2'-O-methylcytidine-3'-phosphate
  modified_base 15: mod_base = OTHER; note = 2'-O-methylcytidine-3'-phosphate
  modified_base 16: mod_base = OTHER; note = 2'-O-methyladenosine-3'-phosphate
  modified_base 17: mod_base = OTHER; note = 2'-O-methylcytidine-3'-phosphate
  modified_base 18: mod_base = OTHER; note = 2'-O-methyluridine-3'-phosphate
  modified_base 19: mod_base = OTHER; note = 2'-O-methylcytidine-3'-phosphorothioate
  modified_base 20: mod_base = OTHER; note = 2'-O-methyluridine-3'-phosphorothioate
  modified_base 21: mod_base = OTHER; note = 2'-O-methyladenosine
accacagtcgtagccactcta

SEQ ID NO: 505 - RNA, 21 nt, synthetic construct
  source 1..21: mol_type = other RNA
  modified_base 1: mod_base = OTHER; note = 2'-O-methyluridine-3'-phosphorothioate
  modified_base 2: mod_base = OTHER; note = 2'-O-methylcytidine-3'-phosphorothioate
  modified_base 3: mod_base = OTHER; note = 2'-O-methylguanosine-3'-phosphate
  modified_base 4: mod_base = OTHER; note = 2'-O-methyluridine-3'-phosphate
  modified_base 5: mod_base = OTHER; note = 2'-O-methyladenosine-3'-phosphate
  modified_base 6: mod_base = OTHER; note = 2'-O-hexadecyl-guanosine-3'-phosphate
  modified_base 7: mod_base = OTHER; note = 2'-deoxy-2'-fluorocytidine-3'-phosphate
  modified_base 8: mod_base = OTHER; note = 2'-O-methylcytidine-3'-phosphate
  modified_base 9: mod_base = OTHER; note = 2'-deoxy-2'-fluoroadenosine-3'-phosphate
  modified_base 10: mod_base = OTHER; note = 2'-deoxy-2'-fluorocytidine-3'-phosphate
  modified_base 11: mod_base = OTHER; note = 2'-deoxy-2'-fluorouridine-3'-phosphate
  modified_base 12: mod_base = OTHER; note = 2'-O-methylcytidine-3'-phosphate
  modified_base 13: mod_base = OTHER; note = 2'-O-methyluridine-3'-phosphate
  modified_base 14: mod_base = OTHER; note = 2'-O-methyladenosine-3'-phosphate
  modified_base 15: mod_base = OTHER; note = 2'-O-methylguanosine-3'-phosphate
  modified_base 16: mod_base = OTHER; note = 2'-O-methylguanosine-3'-phosphate
  modified_base 17: mod_base = OTHER; note = 2'-O-methylcytidine-3'-phosphate
  modified_base 18: mod_base = OTHER; note = 2'-O-methylcytidine-3'-phosphate
  modified_base 19: mod_base = OTHER; note = 2'-O-methyladenosine-3'-phosphorothioate
  modified_base 20: mod_base = OTHER; note = 2'-O-methyladenosine-3'-phosphorothioate
  modified_base 21: mod_base = OTHER; note = 2'-O-methyladenosine
tcgtagccactctaggccaaa

SEQ ID NO: 506 - RNA, 21 nt, synthetic construct
  source 1..21: mol_type = other RNA
  modified_base 1: mod_base = OTHER; note = 2'-O-methyladenosine-3'-phosphorothioate
  modified_base 2: mod_base = OTHER; note = 2'-O-methylguanosine-3'-phosphorothioate
  modified_base 3: mod_base = OTHER; note = 2'-O-methylcytidine-3'-phosphate
  modified_base 4: mod_base = OTHER; note = 2'-O-methylguanosine-3'-phosphate
  modified_base 5: mod_base = OTHER; note = 2'-O-methylcytidine-3'-phosphate
  modified_base 6: mod_base = OTHER; note = 2'-O-hexadecyl-uridine-3'-phosphate
  modified_base 7: mod_base = OTHER; note = 2'-deoxy-2'-fluorocytidine-3'-phosphate
  modified_base 8: mod_base = OTHER; note = 2'-O-methylcytidine-3'-phosphate
  modified_base 9: mod_base = OTHER; note = 2'-deoxy-2'-fluorocytidine-3'-phosphate
  modified_base 10: mod_base = OTHER; note = 2'-deoxy-2'-fluoroadenosine-3'-phosphate
  modified_base 11: mod_base = OTHER; note = 2'-deoxy-2'-fluoroadenosine-3'-phosphate
  modified_base 12: mod_base = OTHER; note = 2'-O-methylguanosine-3'-phosphate
  modified_base 13: mod_base = OTHER; note = 2'-O-methyladenosine-3'-phosphate
  modified_base 14: mod_base = OTHER; note = 2'-O-methyladenosine-3'-phosphate
  modified_base 15: mod_base = OTHER; note = 2'-O-methylguanosine-3'-phosphate
  modified_base 16: mod_base = OTHER; note = 2'-O-methyluridine-3'-phosphate
  modified_base 17: mod_base = OTHER; note = 2'-O-methylguanosine-3'-phosphate
  modified_base 18: mod_base = OTHER; note = 2'-O-methylguanosine-3'-phosphate
  modified_base 19: mod_base = OTHER; note = 2'-O-methylcytidine-3'-phosphorothioate
  modified_base 20: mod_base = OTHER; note = 2'-O-methyluridine-3'-phosphorothioate
  modified_base 21: mod_base = OTHER; note = 2'-O-methyladenosine
agcgctcccaagaagtggcta

SEQ ID NO: 507 - RNA, 21 nt, synthetic construct
  source 1..21: mol_type = other RNA
  modified_base 1: mod_base = OTHER; note = 2'-O-methylcytidine-3'-phosphorothioate
  modified_base 2: mod_base = OTHER; note = 2'-O-methylcytidine-3'-phosphorothioate
  modified_base 3: mod_base = OTHER; note = 2'-O-methylcytidine-3'-phosphate
  modified_base 4: mod_base = OTHER; note = 2'-O-methyladenosine-3'-phosphate
  modified_base 5: mod_base = OTHER; note = 2'-O-methyladenosine-3'-phosphate
  modified_base 6: mod_base = OTHER; note = 2'-O-hexadecyl-guanosine-3'-phosphate
  modified_base 7: mod_base = OTHER; note = 2'-deoxy-2'-fluoroadenosine-3'-phosphate
  modified_base 8: mod_base = OTHER; note = 2'-O-methyladenosine-3'-phosphate
  modified_base 9: mod_base = OTHER; note = 2'-deoxy-2'-fluoroguanosine-3'-phosphate
  modified_base 10: mod_base = OTHER; note = 2'-deoxy-2'-fluorouridine-3'-phosphate
  modified_base 11: mod_base = OTHER; note = 2'-deoxy-2'-fluoroguanosine-3'-phosphate
  modified_base 12: mod_base = OTHER; note = 2'-O-methylguanosine-3'-phosphate
  modified_base 13: mod_base = OTHER; note = 2'-O-methylcytidine-3'-phosphate
  modified_base 14: mod_base = OTHER; note = 2'-O-methyluridine-3'-phosphate
  modified_base 15: mod_base = OTHER; note = 2'-O-methyluridine-3'-phosphate
  modified_base 16: mod_base = OTHER; note = 2'-O-methyladenosine-3'-phosphate
  modified_base 17: mod_base = OTHER; note = 2'-O-methylcytidine-3'-phosphate
  modified_base 18: mod_base = OTHER; note = 2'-O-methyladenosine-3'-phosphate
  modified_base 19: mod_base = OTHER; note = 2'-O-methylcytidine-3'-phosphorothioate
  modified_base 20: mod_base = OTHER; note = 2'-O-methylguanosine-3'-phosphorothioate
  modified_base 21: mod_base = OTHER; note = 2'-O-methyladenosine
cccaagaagtggcttacacga

SEQ ID NO: 508 - RNA, 21 nt, synthetic construct
  source 1..21: mol_type = other RNA
  modified_base 1: mod_base = OTHER; note = 2'-O-methyladenosine-3'-phosphorothioate
  modified_base 2: mod_base = OTHER; note = 2'-O-methylguanosine-3'-phosphorothioate
  modified_base 3: mod_base = OTHER; note = 2'-O-methylcytidine-3'-phosphate
  modified_base 4: mod_base = OTHER; note = 2'-O-methylguanosine-3'-phosphate
  modified_base 5: mod_base = OTHER; note = 2'-O-methylguanosine-3'-phosphate
  modified_base 6: mod_base = OTHER; note = 2'-O-hexadecyl-guanosine-3'-phosphate
  modified_base 7: mod_base = OTHER; note = 2'-deoxy-2'-fluoroadenosine-3'-phosphate
  modified_base 8: mod_base = OTHER; note = 2'-O-methyladenosine-3'-phosphate
  modified_base 9: mod_base = OTHER; note = 2'-deoxy-2'-fluoroguanosine-3'-phosphate
  modified_base 10: mod_base = OTHER; note = 2'-deoxy-2'-fluoroguanosine-3'-phosphate
  modified_base 11: mod_base = OTHER; note = 2'-deoxy-2'-fluorouridine-3'-phosphate
  modified_base 12: mod_base = OTHER; note = 2'-O-methylguanosine-3'-phosphate
  modified_base 13: mod_base = OTHER; note = 2'-O-methyladenosine-3'-phosphate
  modified_base 14: mod_base = OTHER; note = 2'-O-methylcytidine-3'-phosphate
  modified_base 15: mod_base = OTHER; note = 2'-O-methylcytidine-3'-phosphate
  modified_base 16: mod_base = OTHER; note = 2'-O-methyladenosine-3'-phosphate
  modified_base 17: mod_base = OTHER; note = 2'-O-methylcytidine-3'-phosphate
  modified_base 18: mod_base = OTHER; note = 2'-O-methyladenosine-3'-phosphate
  modified_base 19: mod_base = OTHER; note = 2'-O-methylguanosine-3'-phosphorothioate
  modified_base 20: mod_base = OTHER; note = 2'-O-methyluridine-3'-phosphorothioate
  modified_base 21: mod_base = OTHER; note = 2'-O-methyladenosine
agcgggaaggtgaccacagta

SEQ ID NO: 509 - RNA, 21 nt, synthetic construct
  source 1..21: mol_type = other RNA
  modified_base 1: mod_base = OTHER; note = 2'-O-methylguanosine-3'-phosphorothioate
  modified_base 2: mod_base = OTHER; note = 2'-O-methylguanosine-3'-phosphorothioate
  modified_base 3: mod_base = OTHER; note = 2'-O-methylcytidine-3'-phosphate
  modified_base 4: mod_base = OTHER; note = 2'-O-methyluridine-3'-phosphate
  modified_base 5: mod_base = OTHER; note = 2'-O-methyluridine-3'-phosphate
  modified_base 6: mod_base = OTHER; note = 2'-O-hexadecyl-adenosine-3'-phosphate
  modified_base 7: mod_base = OTHER; note = 2'-deoxy-2'-fluorocytidine-3'-phosphate
  modified_base 8: mod_base = OTHER; note = 2'-O-methyladenosine-3'-phosphate
  modified_base 9: mod_base = OTHER; note = 2'-deoxy-2'-fluorocytidine-3'-phosphate
  modified_base 10: mod_base = OTHER; note = 2'-deoxy-2'-fluoroguanosine-3'-phosphate
  modified_base 11: mod_base = OTHER; note = 2'-deoxy-2'-fluoroguanosine-3'-phosphate
  modified_base 12: mod_base = OTHER; note = 2'-O-methyladenosine-3'-phosphate
  modified_base 13: mod_base = OTHER; note = 2'-O-methylcytidine-3'-phosphate
  modified_base 14: mod_base = OTHER; note = 2'-O-methyladenosine-3'-phosphate
  modified_base 15: mod_base = OTHER; note = 2'-O-methyluridine-3'-phosphate
  modified_base 16: mod_base = OTHER; note = 2'-O-methylcytidine-3'-phosphate
  modified_base 17: mod_base = OTHER; note = 2'-O-methyladenosine-3'-phosphate
  modified_base 18: mod_base = OTHER; note = 2'-O-methyladenosine-3'-phosphate
  modified_base 19: mod_base = OTHER; note = 2'-O-methyladenosine-3'-phosphorothioate
  modified_base 20: mod_base = OTHER; note = 2'-O-methylguanosine-3'-phosphorothioate
  modified_base 21: mod_base = OTHER; note = 2'-O-methyladenosine
ggcttacacggacatcaaaga

SEQ ID NO: 510 - RNA, 21 nt, synthetic construct
  source 1..21: mol_type = other RNA
  modified_base 1: mod_base = OTHER; note = 2'-O-methylguanosine-3'-phosphorothioate
  modified_base 2: mod_base = OTHER; note = 2'-O-methyladenosine-3'-phosphorothioate
  modified_base 3: mod_base = OTHER; note = 2'-O-methylcytidine-3'-phosphate
  modified_base 4: mod_base = OTHER; note = 2'-O-methyladenosine-3'-phosphate
  modified_base 5: mod_base = OTHER; note = 2'-O-methyluridine-3'-phosphate
  modified_base 6: mod_base = OTHER; note = 2'-O-hexadecyl-cytidine-3'-phosphate
  modified_base 7: mod_base = OTHER; note = 2'-deoxy-2'-fluoroadenosine-3'-phosphate
  modified_base 8: mod_base = OTHER; note = 2'-O-methyladenosine-3'-phosphate
  modified_base 9: mod_base = OTHER; note = 2'-deoxy-2'-fluoroadenosine-3'-phosphate
  modified_base 10: mod_base = OTHER; note = 2'-deoxy-2'-fluoroguanosine-3'-phosphate
  modified_base 11: mod_base = OTHER; note = 2'-deoxy-2'-fluorouridine-3'-phosphate
  modified_base 12: mod_base = OTHER; note = 2'-O-methylguanosine-3'-phosphate
  modified_base 13: mod_base = OTHER; note = 2'-O-methyladenosine-3'-phosphate
  modified_base 14: mod_base = OTHER; note = 2'-O-methyluridine-3'-phosphate
  modified_base 15: mod_base = OTHER; note = 2'-O-methyluridine-3'-phosphate
  modified_base 16: mod_base = OTHER; note = 2'-O-methylguanosine-3'-phosphate
  modified_base 17: mod_base = OTHER; note = 2'-O-methylguanosine-3'-phosphate
  modified_base 18: mod_base = OTHER; note = 2'-O-methylcytidine-3'-phosphate
  modified_base 19: mod_base = OTHER; note = 2'-O-methyladenosine-3'-phosphorothioate
  modified_base 20: mod_base = OTHER; note = 2'-O-methyladenosine-3'-phosphorothioate
  modified_base 21: mod_base = OTHER; note = 2'-O-methyladenosine
gacatcaaagtgattggcaaa

SEQ ID NO: 511 - RNA, 21 nt, synthetic construct
  source 1..21: mol_type = other RNA
  modified_base 1: mod_base = OTHER; note = 2'-O-methyluridine-3'-phosphorothioate
  modified_base 2: mod_base = OTHER; note = 2'-O-methylguanosine-3'-phosphorothioate
  modified_base 3: mod_base = OTHER; note = 2'-O-methyladenosine-3'-phosphate
  modified_base 4: mod_base = OTHER; note = 2'-O-methyluridine-3'-phosphate
  modified_base 5: mod_base = OTHER; note = 2'-O-methyluridine-3'-phosphate
  modified_base 6: mod_base = OTHER; note = 2'-O-hexadecyl-guanosine-3'-phosphate
  modified_base 7: mod_base = OTHER; note = 2'-deoxy-2'-fluoroguanosine-3'-phosphate
  modified_base 8: mod_base = OTHER; note = 2'-O-methylcytidine-3'-phosphate
  modified_base 9: mod_base = OTHER; note = 2'-deoxy-2'-fluoroadenosine-3'-phosphate
  modified_base 10: mod_base = OTHER; note = 2'-deoxy-2'-fluoroadenosine-3'-phosphate
  modified_base 11: mod_base = OTHER; note = 2'-deoxy-2'-fluorouridine-3'-phosphate
  modified_base 12: mod_base = OTHER; note = 2'-O-methylguanosine-3'-phosphate
  modified_base 13: mod_base = OTHER; note = 2'-O-methylguanosine-3'-phosphate
  modified_base 14: mod_base = OTHER; note = 2'-O-methylcytidine-3'-phosphate
  modified_base 15: mod_base = OTHER; note = 2'-O-methyluridine-3'-phosphate
  modified_base 16: mod_base = OTHER; note = 2'-O-methylcytidine-3'-phosphate
  modified_base 17: mod_base = OTHER; note = 2'-O-methyladenosine-3'-phosphate
  modified_base 18: mod_base = OTHER; note = 2'-O-methyluridine-3'-phosphate
  modified_base 19: mod_base = OTHER; note = 2'-O-methyluridine-3'-phosphorothioate
  modified_base 20: mod_base = OTHER; note = 2'-O-methyluridine-3'-phosphorothioate
  modified_base 21: mod_base = OTHER; note = 2'-O-methyladenosine
tgattggcaatggctcattta

SEQ ID NO: 512 - RNA, 21 nt, synthetic construct
  source 1..21: mol_type = other RNA
  modified_base 1: mod_base = OTHER; note = 2'-O-methylguanosine-3'-phosphorothioate
  modified_base 2: mod_base = OTHER; note = 2'-O-methyladenosine-3'-phosphorothioate
  modified_base 3: mod_base = OTHER; note = 2'-O-methylguanosine-3'-phosphate
  modified_base 4: mod_base = OTHER; note = 2'-O-methyladenosine-3'-phosphate
  modified_base 5: mod_base = OTHER; note = 2'-O-methylcytidine-3'-phosphate
  modified_base 6: mod_base = OTHER; note = 2'-O-hexadecyl-cytidine-3'-phosphate
  modified_base 7: mod_base = OTHER; note = 2'-deoxy-2'-fluoroadenosine-3'-phosphate
  modified_base 8: mod_base = OTHER; note = 2'-O-methylguanosine-3'-phosphate
  modified_base 9: mod_base = OTHER; note = 2'-deoxy-2'-fluoroguanosine-3'-phosphate
  modified_base 10: mod_base = OTHER; note = 2'-deoxy-2'-fluoroguanosine-3'-phosphate
  modified_base 11: mod_base = OTHER; note = 2'-deoxy-2'-fluoroadenosine-3'-phosphate
  modified_base 12: mod_base = OTHER; note = 2'-O-methyladenosine-3'-phosphate
  modified_base 13: mod_base = OTHER; note = 2'-O-methylcytidine-3'-phosphate
  modified_base 14: mod_base = OTHER; note = 2'-O-methyluridine-3'-phosphate
  modified_base 15: mod_base = OTHER; note = 2'-O-methyladenosine-3'-phosphate
  modified_base 16: mod_base = OTHER; note = 2'-O-methylguanosine-3'-phosphate
  modified_base 17: mod_base = OTHER; note = 2'-O-methyluridine-3'-phosphate
  modified_base 18: mod_base = OTHER; note = 2'-O-methylcytidine-3'-phosphate
  modified_base 19: mod_base = OTHER; note = 2'-O-methylguanosine-3'-phosphorothioate
  modified_base 20: mod_base = OTHER; note = 2'-O-methylcytidine-3'-phosphorothioate
  modified_base 21: mod_base = OTHER; note = 2'-O-methyladenosine
gagaccagggaactagtcgca

SEQ ID NO: 513 - RNA, 21 nt, synthetic construct
  source 1..21: mol_type = other RNA
  modified_base 1: mod_base = OTHER; note = 2'-O-methyladenosine-3'-phosphorothioate
  modified_base 2: mod_base = OTHER; note = 2'-O-methylguanosine-3'-phosphorothioate
  modified_base 3: mod_base = OTHER; note = 2'-O-methylguanosine-3'-phosphate
  modified_base 4: mod_base = OTHER; note = 2'-O-methylguanosine-3'-phosphate
  modified_base 5: mod_base = OTHER; note = 2'-O-methyladenosine-3'-phosphate
  modified_base 6: mod_base = OTHER; note = 2'-O-hexadecyl-adenosine-3'-phosphate
  modified_base 7: mod_base = OTHER; note = 2'-deoxy-2'-fluorocytidine-3'-phosphate
  modified_base 8: mod_base = OTHER; note = 2'-O-methyluridine-3'-phosphate
  modified_base 9: mod_base = OTHER; note = 2'-deoxy-2'-fluoroadenosine-3'-phosphate
  modified_base 10: mod_base = OTHER; note = 2'-deoxy-2'-fluoroguanosine-3'-phosphate
  modified_base 11: mod_base = OTHER; note = 2'-deoxy-2'-fluorouridine-3'-phosphate
  modified_base 12: mod_base = OTHER; note = 2'-O-methylcytidine-3'-phosphate
  modified_base 13: mod_base = OTHER; note = 2'-O-methylguanosine-3'-phosphate
  modified_base 14: mod_base = OTHER; note = 2'-O-methylcytidine-3'-phosphate
  modified_base 15: mod_base = OTHER; note = 2'-O-methylcytidine-3'-phosphate
  modified_base 16: mod_base = OTHER; note = 2'-O-methyladenosine-3'-phosphate
  modified_base 17: mod_base = OTHER; note = 2'-O-methyluridine-3'-phosphate
  modified_base 18: mod_base = OTHER; note = 2'-O-methylcytidine-3'-phosphate
  modified_base 19: mod_base = OTHER; note = 2'-O-methyladenosine-3'-phosphorothioate
  modified_base 20: mod_base = OTHER; note = 2'-O-methyladenosine-3'-phosphorothioate
  modified_base 21: mod_base = OTHER; note = 2'-O-methyladenosine
agggaactagtcgccatcaaa

SEQ ID NO: 514 - RNA, 21 nt, synthetic construct
  source 1..21: mol_type = other RNA
  modified_base 1: mod_base = OTHER; note = 2'-O-methylcytidine-3'-phosphorothioate
  modified_base 2: mod_base = OTHER; note = 2'-O-methyluridine-3'-phosphorothioate
  modified_base 3: mod_base = OTHER; note = 2'-O-methyladenosine-3'-phosphate
  modified_base 4: mod_base = OTHER; note = 2'-O-methylguanosine-3'-phosphate
  modified_base 5: mod_base = OTHER; note = 2'-O-methyluridine-3'-phosphate
  modified_base 6: mod_base = OTHER; note = 2'-O-hexadecyl-cytidine-3'-phosphate
  modified_base 7: mod_base = OTHER; note = 2'-deoxy-2'-fluoroguanosine-3'-phosphate
  modified_base 8: mod_base = OTHER; note = 2'-O-methylcytidine-3'-phosphate
  modified_base 9: mod_base = OTHER; note = 2'-deoxy-2'-fluorocytidine-3'-phosphate
  modified_base 10: mod_base = OTHER; note = 2'-deoxy-2'-fluoroadenosine-3'-phosphate
  modified_base 11: mod_base = OTHER; note = 2'-deoxy-2'-fluorouridine-3'-phosphate
  modified_base 12: mod_base = OTHER; note = 2'-O-methylcytidine-3'-phosphate
  modified_base 13: mod_base = OTHER; note = 2'-O-methyladenosine-3'-phosphate
  modified_base 14: mod_base = OTHER; note = 2'-O-methyladenosine-3'-phosphate
  modified_base 15: mod_base = OTHER; note = 2'-O-methylguanosine-3'-phosphate
  modified_base 16: mod_base = OTHER; note = 2'-O-methyladenosine-3'-phosphate
  modified_base 17: mod_base = OTHER; note = 2'-O-methyladenosine-3'-phosphate
  modified_base 18: mod_base = OTHER; note = 2'-O-methylguanosine-3'-phosphate
  modified_base 19: mod_base = OTHER; note = 2'-O-methylguanosine-3'-phosphorothioate
  modified_base 20: mod_base = OTHER; note = 2'-O-methyluridine-3'-phosphorothioate
  modified_base 21: mod_base = OTHER; note = 2'-O-methyladenosine
ctagtcgccatcaagaaggta

SEQ ID NO: 515 - RNA, 21 nt, synthetic construct
  source 1..21: mol_type = other RNA
  modified_base 1: mod_base = OTHER; note = 2'-O-methylguanosine-3'-phosphorothioate
  modified_base 2: mod_base = OTHER; note = 2'-O-methylcytidine-3'-phosphorothioate
  modified_base 3: mod_base = OTHER; note = 2'-O-methylcytidine-3'-phosphate
  modified_base 4: mod_base = OTHER; note = 2'-O-methyladenosine-3'-phosphate
  modified_base 5: mod_base = OTHER; note = 2'-O-methyluridine-3'-phosphate
  modified_base 6: mod_base = OTHER; note = 2'-O-hexadecyl-cytidine-3'-phosphate
  modified_base 7: mod_base = OTHER; note = 2'-deoxy-2'-fluoroadenosine-3'-phosphate
  modified_base 8: mod_base = OTHER; note = 2'-O-methyladenosine-3'-phosphate
  modified_base 9: mod_base = OTHER; note = 2'-deoxy-2'-fluoroguanosine-3'-phosphate
  modified_base 10: mod_base = OTHER; note = 2'-deoxy-2'-fluoroadenosine-3'-phosphate
  modified_base 11: mod_base = OTHER; note = 2'-deoxy-2'-fluoroadenosine-3'-phosphate
  modified_base 12: mod_base = OTHER; note = 2'-O-methylguanosine-3'-phosphate
  modified_base 13: mod_base = OTHER; note = 2'-O-methylguanosine-3'-phosphate
  modified_base 14: mod_base = OTHER; note = 2'-O-methyluridine-3'-phosphate
  modified_base 15: mod_base = OTHER; note = 2'-O-methyluridine-3'-phosphate
  modified_base 16: mod_base = OTHER; note = 2'-O-methylcytidine-3'-phosphate
  modified_base 17: mod_base = OTHER; note = 2'-O-methyluridine-3'-phosphate
  modified_base 18: mod_base = OTHER; note = 2'-O-methylcytidine-3'-phosphate
  modified_base 19: mod_base = OTHER; note = 2'-O-methylcytidine-3'-phosphorothioate
  modified_base 20: mod_base = OTHER; note = 2'-O-methyladenosine-3'-phosphorothioate
  modified_base 21: mod_base = OTHER; note = 2'-O-methyladenosine
gccatcaagaaggttctccaa

SEQ ID NO: 516 - RNA, 21 nt, synthetic construct
  source 1..21: mol_type = other RNA
  modified_base 1: mod_base = OTHER; note = 2'-O-methyladenosine-3'-phosphorothioate
  modified_base 2: mod_base = OTHER; note = 2'-O-methyladenosine-3'-phosphorothioate
  modified_base 3: mod_base = OTHER; note = 2'-O-methylguanosine-3'-phosphate
  modified_base 4: mod_base = OTHER; note = 2'-O-methyladenosine-3'-phosphate
  modified_base 5: mod_base = OTHER; note = 2'-O-methyladenosine-3'-phosphate
  modified_base 6: mod_base = OTHER; note = 2'-O-hexadecyl-guanosine-3'-phosphate
  modified_base 7: mod_base = OTHER; note = 2'-deoxy-2'-fluoroguanosine-3'-phosphate
  modified_base 8: mod_base = OTHER; note = 2'-O-methyluridine-3'-phosphate
  modified_base 9: mod_base = OTHER; note = 2'-deoxy-2'-fluorouridine-3'-phosphate
  modified_base 10: mod_base = OTHER; note = 2'-deoxy-2'-fluorocytidine-3'-phosphate
  modified_base 11: mod_base = OTHER; note = 2'-deoxy-2'-fluorouridine-3'-phosphate
  modified_base 12: mod_base = OTHER; note = 2'-O-methylcytidine-3'-phosphate
  modified_base 13: mod_base = OTHER; note = 2'-O-methylcytidine-3'-phosphate
  modified_base 14: mod_base = OTHER; note = 2'-O-methyladenosine-3'-phosphate
  modified_base 15: mod_base = OTHER; note = 2'-O-methylguanosine-3'-phosphate
  modified_base 16: mod_base = OTHER; note = 2'-O-methylguanosine-3'-phosphate
  modified_base 17: mod_base = OTHER; note = 2'-O-methyladenosine-3'-phosphate
  modified_base 18: mod_base = OTHER; note = 2'-O-methylcytidine-3'-phosphate
  modified_base 19: mod_base = OTHER; note = 2'-O-methyladenosine-3'-phosphorothioate
  modified_base 20: mod_base = OTHER; note = 2'-O-methyladenosine-3'-phosphorothioate
  modified_base 21: mod_base = OTHER; note = 2'-O-methyladenosine
aagaaggttctccaggacaaa

SEQ ID NO: 517 - RNA, 21 nt, synthetic construct
  source 1..21: mol_type = other RNA
  modified_base 1: mod_base = OTHER; note = 2'-O-methylcytidine-3'-phosphorothioate
  modified_base 2: mod_base = OTHER; note = 2'-O-methylcytidine-3'-phosphorothioate
  modified_base 3: mod_base = OTHER; note = 2'-O-methyladenosine-3'-phosphate
  modified_base 4: mod_base = OTHER; note = 2'-O-methylguanosine-3'-phosphate
  modified_base 5: mod_base = OTHER; note = 2'-O-methylguanosine-3'-phosphate
  modified_base 6: mod_base = OTHER; note = 2'-O-hexadecyl-adenosine-3'-phosphate
  modified_base 7: mod_base = OTHER; note = 2'-deoxy-2'-fluorocytidine-3'-phosphate
  modified_base 8: mod_base = OTHER; note = 2'-O-methyladenosine-3'-phosphate
  modified_base 9: mod_base = OTHER; note = 2'-deoxy-2'-fluoroadenosine-3'-phosphate
  modified_base 10: mod_base = OTHER; note = 2'-deoxy-2'-fluoroguanosine-3'-phosphate
  modified_base 11: mod_base = OTHER; note = 2'-deoxy-2'-fluoroadenosine-3'-phosphate
  modified_base 12: mod_base = OTHER; note = 2'-O-methylguanosine-3'-phosphate
  modified_base 13: mod_base = OTHER; note = 2'-O-methylguanosine-3'-phosphate
  modified_base 14: mod_base = OTHER; note = 2'-O-methyluridine-3'-phosphate
  modified_base 15: mod_base = OTHER; note = 2'-O-methyluridine-3'-phosphate
  modified_base 16: mod_base = OTHER; note = 2'-O-methylcytidine-3'-phosphate
  modified_base 17: mod_base = OTHER; note = 2'-O-methyladenosine-3'-phosphate
  modified_base 18: mod_base = OTHER; note = 2'-O-methyladenosine-3'-phosphate
  modified_base 19: mod_base = OTHER; note = 2'-O-methylguanosine-3'-phosphorothioate
  modified_base 20: mod_base = OTHER; note = 2'-O-methyladenosine-3'-phosphorothioate
  modified_base 21: mod_base = OTHER; note = 2'-O-methyladenosine
ccaggacaagaggttcaagaa

SEQ ID NO: 518 - RNA, 21 nt, synthetic construct
  source 1..21: mol_type = other RNA
  modified_base 1: mod_base = OTHER; note = 2'-O-methyladenosine-3'-phosphorothioate
  modified_base 2: mod_base = OTHER; note = 2'-O-methylguanosine-3'-phosphorothioate
  modified_base 3: mod_base = OTHER; note = 2'-O-methylguanosine-3'-phosphate
  modified_base 4: mod_base = OTHER; note = 2'-O-methyluridine-3'-phosphate
  modified_base 5: mod_base = OTHER; note = 2'-O-methyluridine-3'-phosphate
  modified_base 6: mod_base = OTHER; note = 2'-O-hexadecyl-cytidine-3'-phosphate
  modified_base 7: mod_base = OTHER; note = 2'-deoxy-2'-fluoroadenosine-3'-phosphate
  modified_base 8: mod_base = OTHER; note = 2'-O-methyladenosine-3'-phosphate
  modified_base 9: mod_base = OTHER; note = 2'-deoxy-2'-fluoroguanosine-3'-phosphate
  modified_base 10: mod_base = OTHER; note = 2'-deoxy-2'-fluoroadenosine-3'-phosphate
  modified_base 11: mod_base = OTHER; note = 2'-deoxy-2'-fluoroadenosine-3'-phosphate
  modified_base 12: mod_base = OTHER; note = 2'-O-methylcytidine-3'-phosphate
  modified_base 13: mod_base = OTHER; note = 2'-O-methylcytidine-3'-phosphate
  modified_base 14: mod_base = OTHER; note = 2'-O-methylguanosine-3'-phosphate
  modified_base 15: mod_base = OTHER; note = 2'-O-methyladenosine-3'-phosphate
  modified_base 16: mod_base = OTHER; note = 2'-O-methylguanosine-3'-phosphate
  modified_base 17: mod_base = OTHER; note = 2'-O-methyladenosine-3'-phosphate
  modified_base 18: mod_base = OTHER; note = 2'-O-methylguanosine-3'-phosphate
  modified_base 19: mod_base = OTHER; note = 2'-O-methylcytidine-3'-phosphorothioate
  modified_base 20: mod_base = OTHER; note = 2'-O-methyluridine-3'-phosphorothioate
  modified_base 21: mod_base = OTHER; note = 2'-O-methyladenosine
aggttcaagaaccgagagcta

SEQ ID NO: 519 - RNA, 21 nt, synthetic construct
  source 1..21: mol_type = other RNA
  modified_base 1: mod_base = OTHER; note = 2'-O-methyladenosine-3'-phosphorothioate
  modified_base 2: mod_base = OTHER; note = 2'-O-methyladenosine-3'-phosphorothioate
  modified_base 3: mod_base = OTHER; note = 2'-O-methylguanosine-3'-phosphate
  modified_base 4: mod_base = OTHER; note = 2'-O-methyladenosine-3'-phosphate
  modified_base 5: mod_base = OTHER; note = 2'-O-methyladenosine-3'-phosphate
  modified_base 6: mod_base = OTHER; note = 2'-O-hexadecyl-cytidine-3'-phosphate
  modified_base 7: mod_base = OTHER; note = 2'-deoxy-2'-fluorocytidine-3'-phosphate
  modified_base 8: mod_base = OTHER; note = 2'-O-methylguanosine-3'-phosphate
  modified_base 9: mod_base = OTHER; note = 2'-deoxy-2'-fluoroadenosine-3'-phosphate
  modified_base 10: mod_base = OTHER; note = 2'-deoxy-2'-fluoroguanosine-3'-phosphate
  modified_base 11: mod_base = OTHER; note = 2'-deoxy-2'-fluoroadenosine-3'-phosphate
  modified_base 12: mod_base = OTHER; note = 2'-O-methylguanosine-3'-phosphate
  modified_base 13: mod_base = OTHER; note = 2'-O-methylcytidine-3'-phosphate
  modified_base 14: mod_base = OTHER; note = 2'-O-methyluridine-3'-phosphate
  modified_base 15: mod_base = OTHER; note = 2'-O-methylguanosine-3'-phosphate
  modified_base 16: mod_base = OTHER; note = 2'-O-methylcytidine-3'-phosphate
  modified_base 17: mod_base = OTHER; note = 2'-O-methyladenosine-3'-phosphate
  modified_base 18: mod_base = OTHER; note = 2'-O-methylguanosine-3'-phosphate
  modified_base 19: mod_base = OTHER; note = 2'-O-methyladenosine-3'-phosphorothioate
  modified_base 20: mod_base = OTHER; note = 2'-O-methyluridine-3'-phosphorothioate
  modified_base 21: mod_base = OTHER; note = 2'-O-methyladenosine
aagaaccgagagctgcagata

SEQ ID NO: 520 - RNA, 21 nt, synthetic construct
  source 1..21: mol_type = other RNA
  modified_base 1: mod_base = OTHER; note = 2'-O-methylcytidine-3'-phosphorothioate
  modified_base 2: mod_base = OTHER; note = 2'-O-methylguanosine-3'-phosphorothioate
  modified_base 3: mod_base = OTHER; note = 2'-O-methyladenosine-3'-phosphate
  modified_base 4: mod_base = OTHER; note = 2'-O-methylguanosine-3'-phosphate
  modified_base 5: mod_base = OTHER; note = 2'-O-methyladenosine-3'-phosphate
  modified_base 6: mod_base = OTHER; note = 2'-O-hexadecyl-guanosine-3'-phosphate
  modified_base 7: mod_base = OTHER; note = 2'-deoxy-2'-fluorocytidine-3'-phosphate
  modified_base 8: mod_base = OTHER; note = 2'-O-methyluridine-3'-phosphate
  modified_base 9: mod_base = OTHER; note = 2'-deoxy-2'-fluoroguanosine-3'-phosphate
  modified_base 10: mod_base = OTHER; note = 2'-deoxy-2'-fluorocytidine-3'-phosphate
  modified_base 11: mod_base = OTHER; note = 2'-deoxy-2'-fluoroadenosine-3'-phosphate
  modified_base 12: mod_base = OTHER; note = 2'-O-methylguanosine-3'-phosphate
  modified_base 13: mod_base = OTHER; note = 2'-O-methyladenosine-3'-phosphate
  modified_base 14: mod_base = OTHER; note = 2'-O-methyluridine-3'-phosphate
  modified_base 15: mod_base = OTHER; note = 2'-O-methylcytidine-3'-phosphate
  modified_base 16: mod_base = OTHER; note = 2'-O-methyladenosine-3'-phosphate
  modified_base 17: mod_base = OTHER; note = 2'-O-methyluridine-3'-phosphate
  modified_base 18: mod_base = OTHER; note = 2'-O-methylguanosine-3'-phosphate
  modified_base 19: mod_base = OTHER; note = 2'-O-methylcytidine-3'-phosphorothioate
  modified_base 20: mod_base = OTHER; note = 2'-O-methylguanosine-3'-phosphorothioate
  modified_base 21: mod_base = OTHER; note = 2'-O-methyladenosine
cgagagctgcagatcatgcga

SEQ ID NO: 521 - RNA, 21 nt, synthetic construct
  source 1..21: mol_type = other RNA
  modified_base 1: mod_base = OTHER; note = 2'-O-methylcytidine-3'-phosphorothioate
  modified_base 2: mod_base = OTHER; note = 2'-O-methyluridine-3'-phosphorothioate
  modified_base 3: mod_base = OTHER; note = 2'-O-methylguanosine-3'-phosphate
  modified_base 4: mod_base = OTHER; note = 2'-O-methylcytidine-3'-phosphate
  modified_base 5: mod_base = OTHER; note = 2'-O-methyladenosine-3'-phosphate
  modified_base 6: mod_base = OTHER; note = 2'-O-hexadecyl-guanosine-3'-phosphate
  modified_base 7: mod_base = OTHER; note = 2'-deoxy-2'-fluoroadenosine-3'-phosphate
  modified_base 8: mod_base = OTHER; note = 2'-O-methyluridine-3'-phosphate
  modified_base 9: mod_base = OTHER; note = 2'-deoxy-2'-fluorocytidine-3'-phosphate
  modified_base 10: mod_base = OTHER; note = 2'-deoxy-2'-fluoroadenosine-3'-phosphate
  modified_base 11: mod_base = OTHER; note = 2'-deoxy-2'-fluorouridine-3'-phosphate
  modified_base 12: mod_base = OTHER; note = 2'-O-methylguanosine-3'-phosphate
  modified_base 13: mod_base = OTHER; note = 2'-O-methylcytidine-3'-phosphate
  modified_base 14: mod_base = OTHER; note = 2'-O-methylguanosine-3'-phosphate
  modified_base 15: mod_base = OTHER; note = 2'-O-methyluridine-3'-phosphate
  modified_base 16: mod_base = OTHER; note = 2'-O-methyladenosine-3'-phosphate
  modified_base 17: mod_base = OTHER; note = 2'-O-methyladenosine-3'-phosphate
  modified_base 18: mod_base = OTHER; note = 2'-O-methylguanosine-3'-phosphate
  modified_base 19: mod_base = OTHER; note = 2'-O-methylcytidine-3'-phosphorothioate
  modified_base 20: mod_base = OTHER; note = 2'-O-methyluridine-3'-phosphorothioate
  modified_base 21: mod_base = OTHER; note = 2'-O-methyladenosine
ctgcagatcatgcgtaagcta

SEQ ID NO: 522 - RNA, 21 nt, synthetic construct
  source 1..21: mol_type = other RNA
  modified_base 1: mod_base = OTHER; note = 2'-O-methylcytidine-3'-phosphorothioate
  modified_base 2: mod_base = OTHER; note = 2'-O-methyladenosine-3'-phosphorothioate
  modified_base 3: mod_base = OTHER; note = 2'-O-methyluridine-3'-phosphate
  modified_base 4: mod_base = OTHER; note = 2'-O-methylguanosine-3'-phosphate
  modified_base 5: mod_base = OTHER; note = 2'-O-methylcytidine-3'-phosphate
  modified_base 6: mod_base = OTHER; note = 2'-O-hexadecyl-guanosine-3'-phosphate
  modified_base 7: mod_base = OTHER; note = 2'-deoxy-2'-fluorouridine-3'-phosphate
  modified_base 8: mod_base = OTHER; note = 2'-O-methyladenosine-3'-phosphate
  modified_base 9: mod_base = OTHER; note = 2'-deoxy-2'-fluoroadenosine-3'-phosphate
  modified_base 10: mod_base = OTHER; note = 2'-deoxy-2'-fluoroguanosine-3'-phosphate
  modified_base 11: mod_base = OTHER; note = 2'-deoxy-2'-fluorocytidine-3'-phosphate
  modified_base 12: mod_base = OTHER; note = 2'-O-methyluridine-3'-phosphate
  modified_base 13: mod_base = OTHER; note = 2'-O-methylguanosine-3'-phosphate
  modified_base 14: mod_base = OTHER; note = 2'-O-methylguanosine-3'-phosphate
  modified_base 15: mod_base = OTHER; note = 2'-O-methyladenosine-3'-phosphate
  modified_base 16: mod_base = OTHER; note = 2'-O-methylcytidine-3'-phosphate
  modified_base 17: mod_base = OTHER; note = 2'-O-methylcytidine-3'-phosphate
  modified_base 18: mod_base = OTHER; note = 2'-O-methyladenosine-3'-phosphate
  modified_base 19: mod_base = OTHER; note = 2'-O-methylcytidine-3'-phosphorothioate
  modified_base 20: mod_base = OTHER; note = 2'-O-methyluridine-3'-phosphorothioate
  modified_base 21: mod_base = OTHER; note = 2'-O-methyladenosine
catgcgtaagctggaccacta

SEQ ID NO: 523 - RNA, 21 nt, synthetic construct
  source 1..21: mol_type = other RNA
  modified_base 1: mod_base = OTHER; note = 2'-O-methylcytidine-3'-phosphorothioate
  modified_base 2: mod_base = OTHER; note = 2'-O-methyluridine-3'-phosphorothioate
  modified_base 3: mod_base = OTHER; note = 2'-O-methylguanosine-3'-phosphate
  modified_base 4: mod_base = OTHER; note = 2'-O-methylcytidine-3'-phosphate
  modified_base 5: mod_base = OTHER; note = 2'-O-methyladenosine-3'-phosphate
  modified_base 6: mod_base = OTHER; note = 2'-O-hexadecyl-adenosine-3'-phosphate
  modified_base 7: mod_base = OTHER; note = 2'-deoxy-2'-fluorouridine-3'-phosphate
  modified_base 8: mod_base = OTHER; note = 2'-O-methyladenosine-3'-phosphate
  modified_base 9: mod_base = OTHER; note = 2'-deoxy-2'-fluorouridine-3'-phosphate
  modified_base 10: mod_base = OTHER; note = 2'-deoxy-2'-fluorouridine-3'-phosphate
  modified_base 11: mod_base = OTHER; note = 2'-deoxy-2'-fluoroguanosine-3'-phosphate
  modified_base 12: mod_base = OTHER; note = 2'-O-methyluridine-3'-phosphate
  modified_base 13: mod_base = OTHER; note = 2'-O-methylguanosine-3'-phosphate
  modified_base 14: mod_base = OTHER; note = 2'-O-methyladenosine-3'-phosphate
  modified_base 15: mod_base = OTHER; note = 2'-O-methylguanosine-3'-phosphate
  modified_base 16: mod_base = OTHER; note = 2'-O-methylguanosine-3'-phosphate
  modified_base 17: mod_base = OTHER; note = 2'-O-methylcytidine-3'-phosphate
  modified_base 18: mod_base = OTHER; note = 2'-O-methyluridine-3'-phosphate
  modified_base 19: mod_base = OTHER; note = 2'-O-methylguanosine-3'-phosphorothioate
  modified_base 20: mod_base = OTHER; note = 2'-O-methyladenosine-3'-phosphorothioate
  modified_base 21: mod_base = OTHER; note = 2'-O-methyladenosine
ctgcaatattgtgaggctgaa

SEQ ID NO: 524 - RNA, 21 nt, synthetic construct
  source 1..21: mol_type = other RNA
  modified_base 1: mod_base = OTHER; note = 2'-O-methyluridine-3'-phosphorothioate
  modified_base 2: mod_base = OTHER; note = 2'-O-methylguanosine-3'-phosphorothioate
  modified_base 3: mod_base = OTHER; note = 2'-O-methyluridine-3'-phosphate
  modified_base 4: mod_base = OTHER; note = 2'-O-methylguanosine-3'-phosphate
  modified_base 5: mod_base = OTHER; note = 2'-O-methyladenosine-3'-phosphate
  modified_base 6: mod_base = OTHER; note = 2'-O-hexadecyl-guanosine-3'-phosphate
  modified_base 7: mod_base = OTHER; note = 2'-deoxy-2'-fluoroguanosine-3'-phosphate
  modified_base 8: mod_base = OTHER; note = 2'-O-methylcytidine-3'-phosphate
  modified_base 9: mod_base = OTHER; note = 2'-deoxy-2'-fluorouridine-3'-phosphate
  modified_base 10: mod_base = OTHER; note = 2'-deoxy-2'-fluoroguanosine-3'-phosphate
  modified_base 11: mod_base = OTHER; note = 2'-deoxy-2'-fluoroadenosine-3'-phosphate
  modified_base 12: mod_base = OTHER; note = 2'-O-methylguanosine-3'-phosphate
  modified_base 13: mod_base = OTHER; note = 2'-O-methyladenosine-3'-phosphate
  modified_base 14: mod_base = OTHER; note = 2'-O-methyluridine-3'-phosphate
  modified_base 15: mod_base = OTHER; note = 2'-O-methyladenosine-3'-phosphate
  modified_base 16: mod_base = OTHER; note = 2'-O-methylcytidine-3'-phosphate
  modified_base 17: mod_base = OTHER; note = 2'-O-methyluridine-3'-phosphate
  modified_base 18: mod_base = OTHER; note = 2'-O-methyluridine-3'-phosphate
  modified_base 19: mod_base = OTHER; note = 2'-O-methyluridine-3'-phosphorothioate
  modified_base 20: mod_base = OTHER; note = 2'-O-methyluridine-3'-phosphorothioate
  modified_base 21: mod_base = OTHER; note = 2'-O-methyladenosine
tgtgaggctgagatactttta

SEQ ID NO: 525 - RNA, 21 nt, synthetic construct
  source 1..21: mol_type = other RNA
  modified_base 1: mod_base = OTHER; note = 2'-O-methylguanosine-3'-phosphorothioate
  modified_base 2: mod_base = OTHER; note = 2'-O-methylcytidine-3'-phosphorothioate
  modified_base 3: mod_base = OTHER; note = 2'-O-methyluridine-3'-phosphate
  modified_base 4: mod_base = OTHER; note = 2'-O-methylguanosine-3'-phosphate
  modified_base 5: mod_base = OTHER; note = 2'-O-methyladenosine-3'-phosphate
  modified_base 6: mod_base = OTHER; note = 2'-O-hexadecyl-guanosine-3'-phosphate
  modified_base 7: mod_base = OTHER; note = 2'-deoxy-2'-fluoroadenosine-3'-phosphate
  modified_base 8: mod_base = OTHER; note = 2'-O-methyluridine-3'-phosphate
  modified_base 9: mod_base = OTHER; note = 2'-deoxy-2'-fluoroadenosine-3'-phosphate
  modified_base 10: mod_base = OTHER; note = 2'-deoxy-2'-fluorocytidine-3'-phosphate
  modified_base 11: mod_base = OTHER; note = 2'-deoxy-2'-fluorouridine-3'-phosphate
  modified_base 12: mod_base = OTHER; note = 2'-O-methyluridine-3'-phosphate
  modified_base 13: mod_base = OTHER; note = 2'-O-methyluridine-3'-phosphate
  modified_base 14: mod_base = OTHER; note = 2'-O-methyluridine-3'-phosphate
  modified_base 15: mod_base = OTHER; note = 2'-O-methyluridine-3'-phosphate
  modified_base 16: mod_base = OTHER; note = 2'-O-methylcytidine-3'-phosphate
  modified_base 17: mod_base = OTHER; note = 2'-O-methyluridine-3'-phosphate
  modified_base 18: mod_base = OTHER; note = 2'-O-methyladenosine-3'-phosphate
  modified_base 19: mod_base = OTHER; note = 2'-O-methylcytidine-3'-phosphorothioate
  modified_base 20: mod_base = OTHER; note = 2'-O-methyluridine-3'-phosphorothioate
  modified_base 21: mod_base = OTHER; note = 2'-O-methyladenosine
gctgagatactttttctacta

SEQ ID NO: 526 - RNA, 21 nt, synthetic construct
  source 1..21: mol_type = other RNA
  modified_base 1: mod_base = OTHER; note = 2'-O-methyladenosine-3'-phosphorothioate
  modified_base 2: mod_base = OTHER; note = 2'-O-methyluridine-3'-phosphorothioate
  modified_base 3: mod_base = OTHER; note = 2'-O-methyladenosine-3'-phosphate
  modified_base 4: mod_base = OTHER; note = 2'-O-methylcytidine-3'-phosphate
  modified_base 5: mod_base = OTHER; note = 2'-O-methyluridine-3'-phosphate
  modified_base 6: mod_base = OTHER; note = 2'-O-hexadecyl-uridine-3'-phosphate
  modified_base 7: mod_base = OTHER; note = 2'-deoxy-2'-fluorouridine-3'-phosphate
  modified_base 8: mod_base = OTHER; note = 2'-O-methyluridine-3'-phosphate
  modified_base 9: mod_base = OTHER; note = 2'-deoxy-2'-fluorouridine-3'-phosphate
  modified_base 10: mod_base = OTHER; note = 2'-deoxy-2'-fluorocytidine-3'-phosphate
  modified_base 11: mod_base = OTHER; note = 2'-deoxy-2'-fluorouridine-3'-phosphate
  modified_base 12: mod_base = OTHER; note = 2'-O-methyladenosine-3'-phosphate
  modified_base 13: mod_base = OTHER; note = 2'-O-methylcytidine-3'-phosphate
  modified_base 14: mod_base = OTHER; note = 2'-O-methyluridine-3'-phosphate
  modified_base 15: mod_base = OTHER; note = 2'-O-methylcytidine-3'-phosphate
  modified_base 16: mod_base = OTHER; note = 2'-O-methylcytidine-3'-phosphate
  modified_base 17: mod_base = OTHER; note = 2'-O-methyladenosine-3'-phosphate
  modified_base 18: mod_base = OTHER; note = 2'-O-methylguanosine-3'-phosphate
  modified_base 19: mod_base = OTHER; note = 2'-O-methyluridine-3'-phosphorothioate
  modified_base 20: mod_base = OTHER; note = 2'-O-methylguanosine-3'-phosphorothioate
  modified_base 21: mod_base = OTHER; note = 2'-O-methyladenosine
atactttttctactccagtga

SEQ ID NO: 527 - RNA, 21 nt, synthetic construct
  source 1..21: mol_type = other RNA
  modified_base 1: mod_base = OTHER; note = 2'-O-methyluridine-3'-phosphorothioate
  modified_base 2: mod_base = OTHER; note = 2'-O-methyluridine-3'-phosphorothioate
  modified_base 3: mod_base = OTHER; note = 2'-O-methyluridine-3'-phosphate
  modified_base 4: mod_base = OTHER; note = 2'-O-methylcytidine-3'-phosphate
  modified_base 5: mod_base = OTHER; note = 2'-O-methyluridine-3'-phosphate
  modified_base 6: mod_base = OTHER; note = 2'-O-hexadecyl-adenosine-3'-phosphate
  modified_base 7: mod_base = OTHER; note = 2'-deoxy-2'-fluorocytidine-3'-phosphate
  modified_base 8: mod_base = OTHER; note = 2'-O-methyluridine-3'-phosphate
  modified_base 9: mod_base = OTHER; note = 2'-deoxy-2'-fluorocytidine-3'-phosphate
  modified_base 10: mod_base = OTHER; note = 2'-deoxy-2'-fluorocytidine-3'-phosphate
  modified_base 11: mod_base = OTHER; note = 2'-deoxy-2'-fluoroadenosine-3'-phosphate
  modified_base 12: mod_base = OTHER; note = 2'-O-methylguanosine-3'-phosphate
  modified_base 13: mod_base = OTHER; note = 2'-O-methyluridine-3'-phosphate
  modified_base 14: mod_base = OTHER; note = 2'-O-methylguanosine-3'-phosphate
  modified_base 15: mod_base = OTHER; note = 2'-O-methylguanosine-3'-phosphate
  modified_base 16: mod_base = OTHER; note = 2'-O-methylcytidine-3'-phosphate
  modified_base 17: mod_base = OTHER; note = 2'-O-methylguanosine-3'-phosphate
  modified_base 18: mod_base = OTHER; note = 2'-O-methyladenosine-3'-phosphate
  modified_base 19: mod_base = OTHER; note = 2'-O-methylguanosine-3'-phosphorothioate
  modified_base 20: mod_base = OTHER; note = 2'-O-methyladenosine-3'-phosphorothioate
  modified_base 21: mod_base = OTHER; note = 2'-O-methyladenosine
tttctactccagtggcgagaa

SEQ ID NO: 528 - RNA, 21 nt, synthetic construct
  source 1..21: mol_type = other RNA
  modified_base 1: mod_base = OTHER; note = 2'-O-methyluridine-3'-phosphorothioate
  modified_base 2: mod_base = OTHER; note = 2'-O-methylcytidine-3'-phosphorothioate
  modified_base 3: mod_base = OTHER; note = 2'-O-methylcytidine-3'-phosphate
  modified_base 4: mod_base = OTHER; note = 2'-O-methyladenosine-3'-phosphate
  modified_base 5: mod_base = OTHER; note = 2'-O-methylguanosine-3'-phosphate
  modified_base 6: mod_base = OTHER; note = 2'-O-hexadecyl-uridine-3'-phosphate
  modified_base 7: mod_base = OTHER; note = 2'-deoxy-2'-fluoroguanosine-3'-phosphate
  modified_base 8: mod_base = OTHER; note = 2'-O-methylguanosine-3'-phosphate
  modified_base 9: mod_base = OTHER; note = 2'-deoxy-2'-fluorocytidine-3'-phosphate
  modified_base 10: mod_base = OTHER; note = 2'-deoxy-2'-fluoroguanosine-3'-phosphate
  modified_base 11: mod_base = OTHER; note = 2'-deoxy-2'-fluoroadenosine-3'-phosphate
  modified_base 12: mod_base = OTHER; note = 2'-O-methylguanosine-3'-phosphate
  modified_base 13: mod_base = OTHER; note = 2'-O-methyladenosine-3'-phosphate
  modified_base 14: mod_base = OTHER; note = 2'-O-methyladenosine-3'-phosphate
  modified_base 15: mod_base = OTHER; note = 2'-O-methylguanosine-3'-phosphate
  modified_base 16: mod_base = OTHER; note = 2'-O-methyladenosine-3'-phosphate
  modified_base 17: mod_base = OTHER; note = 2'-O-methyladenosine-3'-phosphate
  modified_base 18: mod_base = OTHER; note = 2'-O-methyladenosine-3'-phosphate
  modified_base 19: mod_base = OTHER; note = 2'-O-methylguanosine-3'-phosphorothioate
  modified_base 20: mod_base = OTHER; note = 2'-O-methyladenosine-3'-phosphorothioate
  modified_base 21: mod_base = OTHER; note = 2'-O-methyladenosine
tccagtggcgagaagaaagaa

SEQ ID NO: 529 - RNA, 21 nt, synthetic construct
  source 1..21: mol_type = other RNA
  modified_base 1: mod_base = OTHER; note = 2'-O-methylguanosine-3'-phosphorothioate
  modified_base 2: mod_base = OTHER; note = 2'-O-methylguanosine-3'-phosphorothioate
  modified_base 3: mod_base = OTHER; note = 2'-O-methylcytidine-3'-phosphate
  modified_base 4: mod_base = OTHER; note = 2'-O-methylguanosine-3'-phosphate
  modified_base 5: mod_base = OTHER; note = 2'-O-methyladenosine-3'-phosphate
  modified_base 6: mod_base = OTHER; note = 2'-O-hexadecyl-guanosine-3'-phosphate
  modified_base 7: mod_base = OTHER; note = 2'-deoxy-2'-fluoroadenosine-3'-phosphate
  modified_base 8: mod_base = OTHER; note = 2'-O-methyladenosine-3'-phosphate
  modified_base 9: mod_base = OTHER; note = 2'-deoxy-2'-fluoroguanosine-3'-phosphate
  modified_base 10: mod_base = OTHER; note = 2'-deoxy-2'-fluoroadenosine-3'-phosphate
  modified_base 11: mod_base = OTHER; note = 2'-deoxy-2'-fluoroadenosine-3'-phosphate
  modified_base 12: mod_base = OTHER; note = 2'-O-methyladenosine-3'-phosphate
  modified_base 13: mod_base = OTHER; note = 2'-O-methylguanosine-3'-phosphate
  modified_base 14: mod_base = OTHER; note = 2'-O-methyladenosine-3'-phosphate
  modified_base 15: mod_base = OTHER; note = 2'-O-methylcytidine-3'-phosphate
  modified_base 16: mod_base = OTHER; note = 2'-O-methylguanosine-3'-phosphate
  modified_base 17: mod_base = OTHER; note = 2'-O-methyladenosine-3'-phosphate
  modified_base 18: mod_base = OTHER; note = 2'-O-methylguanosine-3'-phosphate
  modified_base 19: mod_base = OTHER; note = 2'-O-methylcytidine-3'-phosphorothioate
  modified_base 20: mod_base = OTHER; note = 2'-O-methyluridine-3'-phosphorothioate
  modified_base 21: mod_base = OTHER; note = 2'-O-methyladenosine
ggcgagaagaaagacgagcta

SEQ ID NO: 530 - RNA, 21 nt, synthetic construct
  source 1..21: mol_type = other RNA
  modified_base 1: mod_base = OTHER; note = 2'-O-methyladenosine-3'-phosphorothioate
  modified_base 2: mod_base = OTHER; note = 2'-O-methyladenosine-3'-phosphorothioate
  modified_base 3: mod_base = OTHER; note = 2'-O-methylguanosine-3'-phosphate
  modified_base 4: mod_base = OTHER; note = 2'-O-methyladenosine-3'-phosphate
  modified_base 5: mod_base = OTHER; note = 2'-O-methyladenosine-3'-phosphate
  modified_base 6: mod_base = OTHER; note = 2'-O-hexadecyl-adenosine-3'-phosphate
  modified_base 7: mod_base = OTHER; note = 2'-deoxy-2'-fluoroguanosine-3'-phosphate
  modified_base 8: mod_base = OTHER; note = 2'-O-methyladenosine-3'-phosphate
  modified_base 9: mod_base = OTHER; note = 2'-deoxy-2'-fluorocytidine-3'-phosphate
  modified_base 10: mod_base = OTHER; note = 2'-deoxy-2'-fluoroguanosine-3'-phosphate
  modified_base 11: mod_base = OTHER; note = 2'-deoxy-2'-fluoroadenosine-3'-phosphate
  modified_base 12: mod_base = OTHER; note = 2'-O-methylguanosine-3'-phosphate
  modified_base 13: mod_base = OTHER; note = 2'-O-methylcytidine-3'-phosphate
  modified_base 14: mod_base = OTHER; note = 2'-O-methyluridine-3'-phosphate
  modified_base 15: mod_base = OTHER; note = 2'-O-methyluridine-3'-phosphate
  modified_base 16: mod_base = OTHER; note = 2'-O-methyluridine-3'-phosphate
  modified_base 17: mod_base = OTHER; note = 2'-O-methyladenosine-3'-phosphate
  modified_base 18: mod_base = OTHER; note = 2'-O-methylcytidine-3'-phosphate
  modified_base 19: mod_base = OTHER; note = 2'-O-methylcytidine-3'-phosphorothioate
  modified_base 20: mod_base = OTHER; note = 2'-O-methyluridine-3'-phosphorothioate
  modified_base 21: mod_base = OTHER; note = 2'-O-methyladenosine
aagaaagacgagctttaccta

SEQ ID NO: 531 - RNA, 21 nt, synthetic construct
  source 1..21: mol_type = other RNA
  modified_base 1: mod_base = OTHER; note = 2'-O-methylguanosine-3'-phosphorothioate
  modified_base 2: mod_base = OTHER; note = 2'-O-methylguanosine-3'-phosphorothioate
  modified_base 3: mod_base = OTHER; note = 2'-O-methyladenosine-3'-phosphate
  modified_base 4: mod_base = OTHER; note = 2'-O-methylcytidine-3'-phosphate
  modified_base 5: mod_base = OTHER; note = 2'-O-methylcytidine-3'-phosphate
  modified_base 6: mod_base = OTHER; note = 2'-O-hexadecyl-adenosine-3'-phosphate
  modified_base 7: mod_base = OTHER; note = 2'-deoxy-2'-fluorocytidine-3'-phosphate
  modified_base 8: mod_base = OTHER; note = 2'-O-methyluridine-3'-phosphate
  modified_base 9: mod_base = OTHER; note = 2'-deoxy-2'-fluoroguanosine-3'-phosphate
  modified_base 10: mod_base = OTHER; note = 2'-deoxy-2'-fluorocytidine-3'-phosphate
  modified_base 11: mod_base = OTHER; note = 2'-deoxy-2'-fluoroadenosine-3'-phosphate
  modified_base 12: mod_base = OTHER; note = 2'-O-methyladenosine-3'-phosphate
  modified_base 13: mod_base = OTHER; note = 2'-O-methyluridine-3'-phosphate
  modified_base 14: mod_base = OTHER; note = 2'-O-methyladenosine-3'-phosphate
  modified_base 15: mod_base = OTHER; note = 2'-O-methyluridine-3'-phosphate
  modified_base 16: mod_base = OTHER; note = 2'-O-methyluridine-3'-phosphate
  modified_base 17: mod_base = OTHER; note = 2'-O-methylguanosine-3'-phosphate
  modified_base 18: mod_base = OTHER; note = 2'-O-methyluridine-3'-phosphate
  modified_base 19: mod_base = OTHER; note = 2'-O-methylguanosine-3'-phosphorothioate
  modified_base 20: mod_base = OTHER; note = 2'-O-methyladenosine-3'-phosphorothioate
  modified_base 21: mod_base = OTHER; note = 2'-O-methyladenosine
ggaccactgcaatattgtgaa

SEQ ID NO: 532 - RNA, 21 nt, synthetic construct
  source 1..21: mol_type = other RNA
  modified_base 1: mod_base = OTHER; note = 2'-O-methylguanosine-3'-phosphorothioate
  modified_base 2: mod_base = OTHER; note = 2'-O-methyladenosine-3'-phosphorothioate
  modified_base 3: mod_base = OTHER; note = 2'-O-methylcytidine-3'-phosphate
  modified_base 4: mod_base = OTHER; note = 2'-O-methylguanosine-3'-phosphate
  modified_base 5: mod_base = OTHER; note = 2'-O-methyladenosine-3'-phosphate
  modified_base 6: mod_base = OTHER; note = 2'-O-hexadecyl-guanosine-3'-phosphate
  modified_base 7: mod_base = OTHER; note = 2'-deoxy-2'-fluorocytidine-3'-phosphate
  modified_base 8: mod_base = OTHER; note = 2'-O-methyluridine-3'-phosphate
  modified_base 9: mod_base = OTHER; note = 2'-deoxy-2'-fluorouridine-3'-phosphate
  modified_base 10: mod_base = OTHER; note = 2'-deoxy-2'-fluorouridine-3'-phosphate
  modified_base 11: mod_base = OTHER; note = 2'-deoxy-2'-fluoroadenosine-3'-phosphate
  modified_base 12: mod_base = OTHER; note = 2'-O-methylcytidine-3'-phosphate
  modified_base 13: mod_base = OTHER; note = 2'-O-methylcytidine-3'-phosphate
  modified_base 14: mod_base = OTHER; note = 2'-O-methyluridine-3'-phosphate
  modified_base 15: mod_base = OTHER; note = 2'-O-methyladenosine-3'-phosphate
  modified_base 16: mod_base = OTHER; note = 2'-O-methyladenosine-3'-phosphate
  modified_base 17: mod_base = OTHER; note = 2'-O-methyladenosine-3'-phosphate
  modified_base 18: mod_base = OTHER; note = 2'-O-methyluridine-3'-phosphate
  modified_base 19: mod_base = OTHER; note = 2'-O-methylcytidine-3'-phosphorothioate
  modified_base 20: mod_base = OTHER; note = 2'-O-methyluridine-3'-phosphorothioate
  modified_base 21: mod_base = OTHER; note = 2'-O-methyladenosine
gacgagctttacctaaatcta

SEQ ID NO: 533 - RNA, 21 nt, synthetic construct
  source 1..21: mol_type = other RNA
  modified_base 1: mod_base = OTHER; note = 2'-O-methylcytidine-3'-phosphorothioate
  modified_base 2: mod_base = OTHER; note = 2'-O-methyluridine-3'-phosphorothioate
  modified_base 3: mod_base = OTHER; note = 2'-O-methyluridine-3'-phosphate
  modified_base 4: mod_base = OTHER; note = 2'-O-methyluridine-3'-phosphate
  modified_base 5: mod_base = OTHER; note = 2'-O-methyladenosine-3'-phosphate
  modified_base 6: mod_base = OTHER; note = 2'-O-hexadecyl-cytidine-3'-phosphate
  modified_base 7: mod_base = OTHER; note = 2'-deoxy-2'-fluorocytidine-3'-phosphate
  modified_base 8: mod_base = OTHER; note = 2'-O-methyluridine-3'-phosphate
  modified_base 9: mod_base = OTHER; note = 2'-deoxy-2'-fluoroadenosine-3'-phosphate
  modified_base 10: mod_base = OTHER; note = 2'-deoxy-2'-fluoroadenosine-3'-phosphate
  modified_base 11: mod_base = OTHER; note = 2'-deoxy-2'-fluoroadenosine-3'-phosphate
  modified_base 12: mod_base = OTHER; note = 2'-O-methyluridine-3'-phosphate
  modified_base 13: mod_base = OTHER; note = 2'-O-methylcytidine-3'-phosphate
  modified_base 14: mod_base = OTHER; note = 2'-O-methyluridine-3'-phosphate
  modified_base 15: mod_base = OTHER; note = 2'-O-methylguanosine-3'-phosphate
  modified_base 16: mod_base = OTHER; note = 2'-O-methylguanosine-3'-phosphate
  modified_base 17: mod_base = OTHER; note = 2'-O-methyluridine-3'-phosphate
  modified_base 18: mod_base = OTHER; note = 2'-O-methylguanosine-3'-phosphate
  modified_base 19: mod_base = OTHER; note = 2'-O-methylcytidine-3'-phosphorothioate
  modified_base 20: mod_base = OTHER; note = 2'-O-methyluridine-3'-phosphorothioate
  modified_base 21: mod_base = OTHER; note = 2'-O-methyladenosine
ctttacctaaatctggtgcta

SEQ ID NO: 534 - RNA, 21 nt, synthetic construct
  source 1..21: mol_type = other RNA
  modified_base 1: mod_base = OTHER; note = 2'-O-methylcytidine-3'-phosphorothioate
  modified_base 2: mod_base = OTHER; note = 2'-O-methyluridine-3'-phosphorothioate
  modified_base 3: mod_base = OTHER; note = 2'-O-methyladenosine-3'-phosphate
  modified_base 4: mod_base = OTHER; note = 2'-O-methyladenosine-3'-phosphate
  modified_base 5: mod_base = OTHER; note = 2'-O-methyladenosine-3'-phosphate
  modified_base 6: mod_base = OTHER; note = 2'-O-hexadecyl-uridine-3'-phosphate
  modified_base 7: mod_base = OTHER; note = 2'-deoxy-2'-fluorocytidine-3'-phosphate
  modified_base 8: mod_base = OTHER; note = 2'-O-methyluridine-3'-phosphate
  modified_base 9: mod_base = OTHER; note = 2'-deoxy-2'-fluoroguanosine-3'-phosphate
  modified_base 10: mod_base = OTHER; note = 2'-deoxy-2'-fluoroguanosine-3'-phosphate
  modified_base 11: mod_base = OTHER; note = 2'-deoxy-2'-fluorouridine-3'-phosphate
  modified_base 12: mod_base = OTHER; note = 2'-O-methylguanosine-3'-phosphate
  modified_base 13: mod_base = OTHER; note = 2'-O-methylcytidine-3'-phosphate
  modified_base 14: mod_base = OTHER; note = 2'-O-methyluridine-3'-phosphate
  modified_base 15: mod_base = OTHER; note = 2'-O-methylguanosine-3'-phosphate
  modified_base 16: mod_base = OTHER; note = 2'-O-methylguanosine-3'-phosphate
  modified_base 17: mod_base = OTHER; note = 2'-O-methyladenosine-3'-phosphate
  modified_base 18: mod_base = OTHER; note = 2'-O-methyladenosine-3'-phosphate
  modified_base 19: mod_base = OTHER; note = 2'-O-methyluridine-3'-phosphorothioate
  modified_base 20: mod_base = OTHER; note = 2'-O-methyladenosine-3'-phosphorothioate
  modified_base 21: mod_base = OTHER; note = 2'-O-methyladenosine
ctaaatctggtgctggaataa

SEQ ID NO: 535 - RNA, 21 nt, synthetic construct
  source 1..21: mol_type = other RNA
  modified_base 1: mod_base = OTHER; note = 2'-O-methylguanosine-3'-phosphorothioate
  modified_base 2: mod_base = OTHER; note = 2'-O-methylcytidine-3'-phosphorothioate
  modified_base 3: mod_base = OTHER; note = 2'-O-methyluridine-3'-phosphate
  modified_base 4: mod_base = OTHER; note = 2'-O-methylguanosine-3'-phosphate
  modified_base 5: mod_base = OTHER; note = 2'-O-methylguanosine-3'-phosphate
  modified_base 6: mod_base = OTHER; note = 2'-O-hexadecyl-adenosine-3'-phosphate
  modified_base 7: mod_base = OTHER; note = 2'-deoxy-2'-fluoroadenosine-3'-phosphate
  modified_base 8: mod_base = OTHER; note = 2'-O-methyluridine-3'-phosphate
  modified_base 9: mod_base = OTHER; note = 2'-deoxy-2'-fluoroadenosine-3'-phosphate
  modified_base 10: mod_base = OTHER; note = 2'-deoxy-2'-fluorouridine-3'-phosphate
  modified_base 11: mod_base = OTHER; note = 2'-deoxy-2'-fluoroguanosine-3'-phosphate
  modified_base 12: mod_base = OTHER; note = 2'-O-methyluridine-3'-phosphate
  modified_base 13: mod_base = OTHER; note = 2'-O-methylguanosine-3'-phosphate
  modified_base 14: mod_base = OTHER; note = 2'-O-methylcytidine-3'-phosphate
  modified_base 15: mod_base = OTHER; note = 2'-O-methylcytidine-3'-phosphate
  modified_base 16: mod_base = OTHER; note = 2'-O-methylcytidine-3'-phosphate
  modified_base 17: mod_base = OTHER; note = 2'-O-methylguanosine-3'-phosphate
  modified_base 18: mod_base = OTHER; note = 2'-O-methyladenosine-3'-phosphate
  modified_base 19: mod_base = OTHER; note = 2'-O-methylguanosine-3'-phosphorothioate
  modified_base 20: mod_base = OTHER; note = 2'-O-methyladenosine-3'-phosphorothioate
  modified_base 21: mod_base = OTHER; note = 2'-O-methyladenosine
gctggaatatgtgcccgagaa

SEQ ID NO: 536 - RNA, 21 nt, synthetic construct
  source 1..21: mol_type = other RNA
  modified_base 1: mod_base = OTHER; note = 2'-O-methyluridine-3'-phosphorothioate
  modified_base 2: mod_base = OTHER; note = 2'-O-methyladenosine-3'-phosphorothioate
  modified_base 3: mod_base = OTHER; note = 2'-O-methyluridine-3'-phosphate
  modified_base 4: mod_base = OTHER; note = 2'-O-methylguanosine-3'-phosphate
  modified_base 5: mod_base = OTHER; note = 2'-O-methyluridine-3'-phosphate
  modified_base 6: mod_base = OTHER; note = 2'-O-hexadecyl-guanosine-3'-phosphate
  modified_base 7: mod_base = OTHER; note = 2'-deoxy-2'-fluorocytidine-3'-phosphate
  modified_base 8: mod_base = OTHER; note = 2'-O-methylcytidine-3'-phosphate
  modified_base 9: mod_base = OTHER; note = 2'-deoxy-2'-fluorocytidine-3'-phosphate
  modified_base 10: mod_base = OTHER; note = 2'-deoxy-2'-fluoroguanosine-3'-phosphate
  modified_base 11: mod_base = OTHER; note = 2'-deoxy-2'-fluoroadenosine-3'-phosphate
  modified_base 12: mod_base = OTHER; note = 2'-O-methylguanosine-3'-phosphate
  modified_base 13: mod_base = OTHER; note = 2'-O-methyladenosine-3'-phosphate
  modified_base 14: mod_base = OTHER; note = 2'-O-methylcytidine-3'-phosphate
  modified_base 15: mod_base = OTHER; note = 2'-O-methyladenosine-3'-phosphate
  modified_base 16: mod_base = OTHER; note = 2'-O-methylguanosine-3'-phosphate
  modified_base 17: mod_base = OTHER; note = 2'-O-methyluridine-3'-phosphate
  modified_base 18: mod_base = OTHER; note = 2'-O-methylguanosine-3'-phosphate
  modified_base 19: mod_base = OTHER; note = 2'-O-methyluridine-3'-phosphorothioate
  modified_base 20: mod_base = OTHER; note = 2'-O-methyladenosine-3'-phosphorothioate
  modified_base 21: mod_base = OTHER; note = 2'-O-methyladenosine
tatgtgcccgagacagtgtaa

SEQ ID NO: 537 - RNA, 21 nt, synthetic construct
  source 1..21: mol_type = other RNA
  modified_base 1: mod_base = OTHER; note = 2'-O-methylcytidine-3'-phosphorothioate
  modified_base 2: mod_base = OTHER; note = 2'-O-methylcytidine-3'-phosphorothioate
  modified_base 3: mod_base = OTHER; note = 2'-O-methylcytidine-3'-phosphate
  modified_base 4: mod_base = OTHER; note = 2'-O-methylguanosine-3'-phosphate
  modified_base 5: mod_base = OTHER; note = 2'-O-methyladenosine-3'-phosphate
  modified_base 6: mod_base = OTHER; note = 2'-O-hexadecyl-guanosine-3'-phosphate
  modified_base 7: mod_base = OTHER; note = 2'-deoxy-2'-fluoroadenosine-3'-phosphate
  modified_base 8: mod_base = OTHER; note = 2'-O-methylcytidine-3'-phosphate
  modified_base 9: mod_base = OTHER; note = 2'-deoxy-2'-fluoroadenosine-3'-phosphate
  modified_base 10: mod_base = OTHER; note = 2'-deoxy-2'-fluoroguanosine-3'-phosphate
  modified_base 11: mod_base = OTHER; note = 2'-deoxy-2'-fluorouridine-3'-phosphate
  modified_base 12: mod_base = OTHER; note = 2'-O-methylguanosine-3'-phosphate
  modified_base 13: mod_base = OTHER; note = 2'-O-methyluridine-3'-phosphate
  modified_base 14: mod_base = OTHER; note = 2'-O-methyladenosine-3'-phosphate
  modified_base 15: mod_base = OTHER; note = 2'-O-methylcytidine-3'-phosphate
  modified_base 16: mod_base = OTHER; note = 2'-O-methylcytidine-3'-phosphate
  modified_base 17: mod_base = OTHER; note = 2'-O-methylguanosine-3'-phosphate
  modified_base 18: mod_base = OTHER; note = 2'-O-methylguanosine-3'-phosphate
  modified_base 19: mod_base = OTHER; note = 2'-O-methylguanosine-3'-phosphorothioate
  modified_base 20: mod_base = OTHER; note = 2'-O-methyluridine-3'-phosphorothioate
  modified_base 21: mod_base = OTHER; note = 2'-O-methyladenosine
cccgagacagtgtaccgggta

SEQ ID NO: 538 - RNA, 21 nt, synthetic construct
  source 1..21: mol_type = other RNA
  modified_base 1: mod_base = OTHER; note = 2'-O-methyluridine-3'-phosphorothioate
  modified_base 2: mod_base = OTHER; note = 2'-O-methyluridine-3'-phosphorothioate
  modified_base 3: mod_base = OTHER; note = 2'-O-methylcytidine-3'-phosphate
  modified_base 4: mod_base = OTHER; note = 2'-O-methyladenosine-3'-phosphate
  modified_base 5: mod_base = OTHER; note = 2'-O-methylcytidine-3'-phosphate
  modified_base 6: mod_base = OTHER; note = 2'-O-hexadecyl-cytidine-3'-phosphate
  modified_base 7: mod_base = OTHER; note = 2'-deoxy-2'-fluoroadenosine-3'-phosphate
  modified_base 8: mod_base = OTHER; note = 2'-O-methyladenosine-3'-phosphate
  modified_base 9: mod_base = OTHER; note = 2'-deoxy-2'-fluoroguanosine-3'-phosphate
  modified_base 10: mod_base = OTHER; note = 2'-deoxy-2'-fluoroguanosine-3'-phosphate
  modified_base 11: mod_base = OTHER; note = 2'-deoxy-2'-fluorocytidine-3'-phosphate
  modified_base 12: mod_base = OTHER; note = 2'-O-methylcytidine-3'-phosphate
  modified_base 13: mod_base = OTHER; note = 2'-O-methyladenosine-3'-phosphate
  modified_base 14: mod_base = OTHER; note = 2'-O-methyladenosine-3'-phosphate
  modified_base 15: mod_base = OTHER; note = 2'-O-methylguanosine-3'-phosphate
  modified_base 16: mod_base = OTHER; note = 2'-O-methyluridine-3'-phosphate
  modified_base 17: mod_base = OTHER; note = 2'-O-methyluridine-3'-phosphate
  modified_base 18: mod_base = OTHER; note = 2'-O-methylguanosine-3'-phosphate
  modified_base 19: mod_base = OTHER; note = 2'-O-methyladenosine-3'-phosphorothioate
  modified_base 20: mod_base = OTHER; note = 2'-O-methylcytidine-3'-phosphorothioate
  modified_base 21: mod_base = OTHER; note = 2'-O-methyladenosine
ttcaccaaggccaagttgaca

SEQ ID NO: 539 - RNA, 21 nt, synthetic construct
  source 1..21: mol_type = other RNA
  modified_base 1: mod_base = OTHER; note = 2'-O-methylguanosine-3'-phosphorothioate
  modified_base 2: mod_base = OTHER; note = 2'-O-methylguanosine-3'-phosphorothioate
  modified_base 3: mod_base = OTHER; note = 2'-O-methylcytidine-3'-phosphate
  modified_base 4: mod_base = OTHER; note = 2'-O-methylcytidine-3'-phosphate
  modified_base 5: mod_base = OTHER; note = 2'-O-methyladenosine-3'-phosphate
  modified_base 6: mod_base = OTHER; note = 2'-O-hexadecyl-adenosine-3'-phosphate
  modified_base 7: mod_base = OTHER; note = 2'-deoxy-2'-fluoroguanosine-3'-phosphate
  modified_base 8: mod_base = OTHER; note = 2'-O-methyluridine-3'-phosphate
  modified_base 9: mod_base = OTHER; note = 2'-deoxy-2'-fluorouridine-3'-phosphate
  modified_base 10: mod_base = OTHER; note = 2'-deoxy-2'-fluoroguanosine-3'-phosphate
  modified_base 11: mod_base = OTHER; note = 2'-deoxy-2'-fluoroadenosine-3'-phosphate
  modified_base 12: mod_base = OTHER; note = 2'-O-methylcytidine-3'-phosphate
  modified_base 13: mod_base = OTHER; note = 2'-O-methylcytidine-3'-phosphate
  modified_base 14: mod_base = OTHER; note = 2'-O-methyladenosine-3'-phosphate
  modified_base 15: mod_base = OTHER; note = 2'-O-methyluridine-3'-phosphate
  modified_base 16: mod_base = OTHER; note = 2'-O-methylcytidine-3'-phosphate
  modified_base 17: mod_base = OTHER; note = 2'-O-methylcytidine-3'-phosphate
  modified_base 18: mod_base = OTHER; note = 2'-O-methylcytidine-3'-phosphate
  modified_base 19: mod_base = OTHER; note = 2'-O-methyluridine-3'-phosphorothioate
  modified_base 20: mod_base = OTHER; note = 2'-O-methyladenosine-3'-phosphorothioate
  modified_base 21: mod_base = OTHER; note = 2'-O-methyladenosine
ggccaagttgaccatccctaa

SEQ ID NO: 540 - RNA, 21 nt, synthetic construct
  source 1..21: mol_type = other RNA
  modified_base 1: mod_base = OTHER; note = 2'-O-methyluridine-3'-phosphorothioate
  modified_base 2: mod_base = OTHER; note = 2'-O-methyluridine-3'-phosphorothioate
  modified_base 3: mod_base = OTHER; note = 2'-O-methylguanosine-3'-phosphate
  modified_base 4: mod_base = OTHER; note = 2'-O-methyladenosine-3'-phosphate
  modified_base 5: mod_base = OTHER; note = 2'-O-methylcytidine-3'-phosphate
  modified_base 6: mod_base = OTHER; note = 2'-O-hexadecyl-cytidine-3'-phosphate
  modified_base 7: mod_base = OTHER; note = 2'-deoxy-2'-fluoroadenosine-3'-phosphate
  modified_base 8: mod_base = OTHER; note = 2'-O-methyluridine-3'-phosphate
  modified_base 9: mod_base = OTHER; note = 2'-deoxy-2'-fluorocytidine-3'-phosphate
  modified_base 10: mod_base = OTHER; note = 2'-deoxy-2'-fluorocytidine-3'-phosphate
  modified_base 11: mod_base = OTHER; note = 2'-deoxy-2'-fluorocytidine-3'-phosphate
  modified_base 12: mod_base = OTHER; note = 2'-O-methyluridine-3'-phosphate
  modified_base 13: mod_base = OTHER; note = 2'-O-methyladenosine-3'-phosphate
  modified_base 14: mod_base = OTHER; note = 2'-O-methyluridine-3'-phosphate
  modified_base 15: mod_base = OTHER; note = 2'-O-methylcytidine-3'-phosphate
  modified_base 16: mod_base = OTHER; note = 2'-O-methylcytidine-3'-phosphate
  modified_base 17: mod_base = OTHER; note = 2'-O-methyluridine-3'-phosphate
  modified_base 18: mod_base = OTHER; note = 2'-O-methylcytidine-3'-phosphate
  modified_base 19: mod_base = OTHER; note = 2'-O-methyluridine-3'-phosphorothioate
  modified_base 20: mod_base = OTHER; note = 2'-O-methyladenosine-3'-phosphorothioate
  modified_base 21: mod_base = OTHER; note = 2'-O-methyladenosine
ttgaccatccctatcctctaa

SEQ ID NO: 541 - RNA, 21 nt, synthetic construct
  source 1..21: mol_type = other RNA
  modified_base 1: mod_base = OTHER; note = 2'-O-methyladenosine-3'-phosphorothioate
  modified_base 2: mod_base = OTHER; note = 2'-O-methyluridine-3'-phosphorothioate
  modified_base 3: mod_base = OTHER; note = 2'-O-methylcytidine-3'-phosphate
  modified_base 4: mod_base = OTHER; note = 2'-O-methylcytidine-3'-phosphate
  modified_base 5: mod_base = OTHER; note = 2'-O-methylcytidine-3'-phosphate
  modified_base 6: mod_base = OTHER; note = 2'-O-hexadecyl-uridine-3'-phosphate
  modified_base 7: mod_base = OTHER; note = 2'-deoxy-2'-fluoroadenosine-3'-phosphate
  modified_base 8: mod_base = OTHER; note = 2'-O-methyluridine-3'-phosphate
  modified_base 9: mod_base = OTHER; note = 2'-deoxy-2'-fluorocytidine-3'-phosphate
  modified_base 10: mod_base = OTHER; note = 2'-deoxy-2'-fluorocytidine-3'-phosphate
  modified_base 11: mod_base = OTHER; note = 2'-deoxy-2'-fluorouridine-3'-phosphate
  modified_base 12: mod_base = OTHER; note = 2'-O-methylcytidine-3'-phosphate
  modified_base 13: mod_base = OTHER; note = 2'-O-methyluridine-3'-phosphate
  modified_base 14: mod_base = OTHER; note = 2'-O-methyladenosine-3'-phosphate
  modified_base 15: mod_base = OTHER; note = 2'-O-methyluridine-3'-phosphate
  modified_base 16: mod_base = OTHER; note = 2'-O-methylguanosine-3'-phosphate
  modified_base 17: mod_base = OTHER; note = 2'-O-methyluridine-3'-phosphate
  modified_base 18: mod_base = OTHER; note = 2'-O-methylcytidine-3'-phosphate
  modified_base 19: mod_base = OTHER; note = 2'-O-methyladenosine-3'-phosphorothioate
  modified_base 20: mod_base = OTHER; note = 2'-O-methyladenosine-3'-phosphorothioate
  modified_base 21: mod_base = OTHER; note = 2'-O-methyladenosine
atccctatcctctatgtcaaa

SEQ ID NO: 542 - RNA, 21 nt, synthetic construct
  source 1..21: mol_type = other RNA
  modified_base 1: mod_base = OTHER; note = 2'-O-methylcytidine-3'-phosphorothioate
  modified_base 2: mod_base = OTHER; note = 2'-O-methyluridine-3'-phosphorothioate
  modified_base 3: mod_base = OTHER; note = 2'-O-methylcytidine-3'-phosphate
  modified_base 4: mod_base = OTHER; note = 2'-O-methyluridine-3'-phosphate
  modified_base 5: mod_base = OTHER; note = 2'-O-methyladenosine-3'-phosphate
  modified_base 6: mod_base = OTHER; note = 2'-O-hexadecyl-uridine-3'-phosphate
  modified_base 7: mod_base = OTHER; note = 2'-deoxy-2'-fluoroguanosine-3'-phosphate
  modified_base 8: mod_base = OTHER; note = 2'-O-methyluridine-3'-phosphate
  modified_base 9: mod_base = OTHER; note = 2'-deoxy-2'-fluorocytidine-3'-phosphate
  modified_base 10: mod_base = OTHER; note = 2'-deoxy-2'-fluoroadenosine-3'-phosphate
  modified_base 11: mod_base = OTHER; note = 2'-deoxy-2'-fluoroadenosine-3'-phosphate
  modified_base 12: mod_base = OTHER; note = 2'-O-methylguanosine-3'-phosphate
  modified_base 13: mod_base = OTHER; note = 2'-O-methylguanosine-3'-phosphate
  modified_base 14: mod_base = OTHER; note = 2'-O-methyluridine-3'-phosphate
  modified_base 15: mod_base = OTHER; note = 2'-O-methylguanosine-3'-phosphate
  modified_base 16: mod_base = OTHER; note = 2'-O-methyluridine-3'-phosphate
  modified_base 17: mod_base = OTHER; note = 2'-O-methyladenosine-3'-phosphate
  modified_base 18: mod_base = OTHER; note = 2'-O-methylcytidine-3'-phosphate
  modified_base 19: mod_base = OTHER; note = 2'-O-methyladenosine-3'-phosphorothioate
  modified_base 20: mod_base = OTHER; note = 2'-O-methyluridine-3'-phosphorothioate
  modified_base 21: mod_base = OTHER; note = 2'-O-methyladenosine
ctctatgtcaaggtgtacata

SEQ ID NO: 543 - RNA, 21 nt, synthetic construct
  source 1..21: mol_type = other RNA
  modified_base 1: mod_base = OTHER; note = 2'-O-methylguanosine-3'-phosphorothioate
  modified_base 2: mod_base = OTHER; note = 2'-O-methyluridine-3'-phosphorothioate
  modified_base 3: mod_base = OTHER; note = 2'-O-methylcytidine-3'-phosphate
  modified_base 4: mod_base = OTHER; note = 2'-O-methyladenosine-3'-phosphate
  modified_base 5: mod_base = OTHER; note = 2'-O-methyladenosine-3'-phosphate
  modified_base 6: mod_base = OTHER; note = 2'-O-hexadecyl-guanosine-3'-phosphate
  modified_base 7: mod_base = OTHER; note = 2'-deoxy-2'-fluoroguanosine-3'-phosphate
  modified_base 8: mod_base = OTHER; note = 2'-O-methyluridine-3'-phosphate
  modified_base 9: mod_base = OTHER; note = 2'-deoxy-2'-fluoroguanosine-3'-phosphate
  modified_base 10: mod_base = OTHER; note = 2'-deoxy-2'-fluorouridine-3'-phosphate
  modified_base 11: mod_base = OTHER; note = 2'-deoxy-2'-fluoroadenosine-3'-phosphate
  modified_base 12: mod_base = OTHER; note = 2'-O-methylcytidine-3'-phosphate
  modified_base 13: mod_base = OTHER; note = 2'-O-methyladenosine-3'-phosphate
  modified_base 14: mod_base = OTHER; note = 2'-O-methyluridine-3'-phosphate
  modified_base 15: mod_base = OTHER; note = 2'-O-methylguanosine-3'-phosphate
  modified_base 16: mod_base = OTHER; note = 2'-O-methyluridine-3'-phosphate
  modified_base 17: mod_base = OTHER; note = 2'-O-methyladenosine-3'-phosphate
  modified_base 18: mod_base = OTHER; note = 2'-O-methylcytidine-3'-phosphate
  modified_base 19: mod_base = OTHER; note = 2'-O-methylcytidine-3'-phosphorothioate
  modified_base 20: mod_base = OTHER; note = 2'-O-methyladenosine-3'-phosphorothioate
  modified_base 21: mod_base = OTHER; note = 2'-O-methyladenosine
gtcaaggtgtacatgtaccaa

SEQ ID NO: 544 - RNA, 21 nt, synthetic construct
  source 1..21: mol_type = other RNA
  modified_base 1: mod_base = OTHER; note = 2'-O-methylcytidine-3'-phosphorothioate
  modified_base 2: mod_base = OTHER; note = 2'-O-methylguanosine-3'-phosphorothioate
  modified_base 3: mod_base = OTHER; note = 2'-O-methylcytidine-3'-phosphate
  modified_base 4: mod_base = OTHER; note = 2'-O-methylcytidine-3'-phosphate
  modified_base 5: mod_base = OTHER; note = 2'-O-methyladenosine-3'-phosphate
  modified_base 6: mod_base = OTHER; note = 2'-O-hexadecyl-cytidine-3'-phosphate
  modified_base 7: mod_base = OTHER; note = 2'-deoxy-2'-fluorouridine-3'-phosphate
  modified_base 8: mod_base = OTHER; note = 2'-O-methyluridine-3'-phosphate
  modified_base 9: mod_base = OTHER; note = 2'-deoxy-2'-fluorocytidine-3'-phosphate
  modified_base 10: mod_base = OTHER; note = 2'-deoxy-2'-fluoroadenosine-3'-phosphate
  modified_base 11: mod_base = OTHER; note = 2'-deoxy-2'-fluorocytidine-3'-phosphate
  modified_base 12: mod_base = OTHER; note = 2'-O-methylcytidine-3'-phosphate
  modified_base 13: mod_base = OTHER; note = 2'-O-methyladenosine-3'-phosphate
  modified_base 14: mod_base = OTHER; note = 2'-O-methyladenosine-3'-phosphate
  modified_base 15: mod_base = OTHER; note = 2'-O-methylguanosine-3'-phosphate
  modified_base 16: mod_base = OTHER; note = 2'-O-methylguanosine-3'-phosphate
  modified_base 17: mod_base = OTHER; note = 2'-O-methylcytidine-3'-phosphate
  modified_base 18: mod_base = OTHER; note = 2'-O-methylcytidine-3'-phosphate
  modified_base 19: mod_base = OTHER; note = 2'-O-methyladenosine-3'-phosphorothioate
  modified_base 20: mod_base = OTHER; note = 2'-O-methyladenosine-3'-phosphorothioate
  modified_base 21: mod_base = OTHER; note = 2'-O-methyladenosine
cgccacttcaccaaggccaaa

SEQ ID NO: 545 - RNA, 21 nt, synthetic construct
  source 1..21: mol_type = other RNA
  modified_base 1: mod_base = OTHER; note = 2'-O-methyluridine-3'-phosphorothioate
  modified_base 2: mod_base = OTHER; note = 2'-O-methyladenosine-3'-phosphorothioate
  modified_base 3: mod_base = OTHER; note = 2'-O-methylcytidine-3'-phosphate
  modified_base 4: mod_base = OTHER; note = 2'-O-methylcytidine-3'-phosphate
  modified_base 5: mod_base = OTHER; note = 2'-O-methyladenosine-3'-phosphate
  modified_base 6: mod_base = OTHER; note = 2'-O-hexadecyl-guanosine-3'-phosphate
  modified_base 7: mod_base = OTHER; note = 2'-deoxy-2'-fluorocytidine-3'-phosphate
  modified_base 8: mod_base = OTHER; note = 2'-O-methyluridine-3'-phosphate
  modified_base 9: mod_base = OTHER; note = 2'-deoxy-2'-fluorocytidine-3'-phosphate
  modified_base 10: mod_base = OTHER; note = 2'-deoxy-2'-fluorouridine-3'-phosphate
  modified_base 11: mod_base = OTHER; note = 2'-deoxy-2'-fluorouridine-3'-phosphate
  modified_base 12: mod_base = OTHER; note = 2'-O-methylcytidine-3'-phosphate
  modified_base 13: mod_base = OTHER; note = 2'-O-methylcytidine-3'-phosphate
  modified_base 14: mod_base = OTHER; note = 2'-O-methylguanosine-3'-phosphate
  modified_base 15: mod_base = OTHER; note = 2'-O-methylcytidine-3'-phosphate
  modified_base 16: mod_base = OTHER; note = 2'-O-methyladenosine-3'-phosphate
  modified_base 17: mod_base = OTHER; note = 2'-O-methylguanosine-3'-phosphate
  modified_base 18: mod_base = OTHER; note = 2'-O-methylcytidine-3'-phosphate
  modified_base 19: mod_base = OTHER; note = 2'-O-methyluridine-3'-phosphorothioate
  modified_base 20: mod_base = OTHER; note = 2'-O-methyluridine-3'-phosphorothioate
  modified_base 21: mod_base = OTHER; note = 2'-O-methyladenosine
taccagctcttccgcagctta

SEQ ID NO: 546 - RNA, 21 nt, synthetic construct
  source 1..21: mol_type = other RNA
  modified_base 1: mod_base = OTHER; note = 2'-O-methylcytidine-3'-phosphorothioate
  modified_base 2: mod_base = OTHER; note = 2'-O-methyluridine-3'-phosphorothioate
  modified_base 3: mod_base = OTHER; note = 2'-O-methyluridine-3'-phosphate
  modified_base 4: mod_base = OTHER; note = 2'-O-methylcytidine-3'-phosphate
  modified_base 5: mod_base = OTHER; note = 2'-O-methylcytidine-3'-phosphate
  modified_base 6: mod_base = OTHER; note = 2'-O-hexadecyl-guanosine-3'-phosphate
  modified_base 7: mod_base = OTHER; note = 2'-deoxy-2'-fluorocytidine-3'-phosphate
  modified_base 8: mod_base = OTHER; note = 2'-O-methyladenosine-3'-phosphate
  modified_base 9: mod_base = OTHER; note = 2'-deoxy-2'-fluoroguanosine-3'-phosphate
  modified_base 10: mod_base = OTHER; note = 2'-deoxy-2'-fluorocytidine-3'-phosphate
  modified_base 11: mod_base = OTHER; note = 2'-deoxy-2'-fluorouridine-3'-phosphate
  modified_base 12: mod_base = OTHER; note = 2'-O-methyluridine-3'-phosphate
  modified_base 13: mod_base = OTHER; note = 2'-O-methylguanosine-3'-phosphate
  modified_base 14: mod_base = OTHER; note = 2'-O-methylguanosine-3'-phosphate
  modified_base 15: mod_base = OTHER; note = 2'-O-methylcytidine-3'-phosphate
  modified_base 16: mod_base = OTHER; note = 2'-O-methylcytidine-3'-phosphate
  modified_base 17: mod_base = OTHER; note = 2'-O-methyluridine-3'-phosphate
  modified_base 18: mod_base = OTHER; note = 2'-O-methyladenosine-3'-phosphate
  modified_base 19: mod_base = OTHER; note = 2'-O-methylcytidine-3'-phosphorothioate
  modified_base 20: mod_base = OTHER; note = 2'-O-methyladenosine-3'-phosphorothioate
  modified_base 21: mod_base = OTHER; note = 2'-O-methyladenosine
cttccgcagcttggcctacaa

SEQ ID NO: 547 - RNA, 21 nt, synthetic construct
  source 1..21: mol_type = other RNA
  modified_base 1: mod_base = OTHER; note = 2'-O-methylguanosine-3'-phosphorothioate
  modified_base 2: mod_base = OTHER; note = 2'-O-methylguanosine-3'-phosphorothioate
  modified_base 3: mod_base = OTHER; note = 2'-O-methylcytidine-3'-phosphate
  modified_base 4: mod_base = OTHER; note = 2'-O-methylguanosine-3'-phosphate
  modified_base 5: mod_base = OTHER; note = 2'-O-methyluridine-3'-phosphate
  modified_base 6: mod_base = OTHER; note = 2'-O-hexadecyl-guanosine-3'-phosphate
  modified_base 7: mod_base = OTHER; note = 2'-deoxy-2'-fluorouridine-3'-phosphate
  modified_base 8: mod_base = OTHER; note = 2'-O-methylguanosine-3'-phosphate
  modified_base 9: mod_base = OTHER; note = 2'-deoxy-2'-fluorouridine-3'-phosphate
  modified_base 10: mod_base = OTHER; note = 2'-deoxy-2'-fluorocytidine-3'-phosphate
  modified_base 11: mod_base = OTHER; note = 2'-deoxy-2'-fluoroadenosine-3'-phosphate
  modified_base 12: mod_base = OTHER; note = 2'-O-methylcytidine-3'-phosphate
  modified_base 13: mod_base = OTHER; note = 2'-O-methylcytidine-3'-phosphate
  modified_base 14: mod_base = OTHER; note = 2'-O-methylguanosine-3'-phosphate
  modified_base 15: mod_base = OTHER; note = 2'-O-methylcytidine-3'-phosphate
  modified_base 16: mod_base = OTHER; note = 2'-O-methylguanosine-3'-phosphate
  modified_base 17: mod_base = OTHER; note = 2'-O-methyladenosine-3'-phosphate
  modified_base 18: mod_base = OTHER; note = 2'-O-methylcytidine-3'-phosphate
  modified_base 19: mod_base = OTHER; note = 2'-O-methyladenosine-3'-phosphorothioate
  modified_base 20: mod_base = OTHER; note = 2'-O-methyluridine-3'-phosphorothioate
  modified_base 21: mod_base = OTHER; note = 2'-O-methyladenosine
ggcgtgtgtcaccgcgacata

SEQ ID NO: 548 - RNA, 21 nt, synthetic construct
  source 1..21: mol_type = other RNA
  modified_base 1: mod_base = OTHER; note = 2'-O-methylguanosine-3'-phosphorothioate
  modified_base 2: mod_base = OTHER; note = 2'-O-methyluridine-3'-phosphorothioate
  modified_base 3: mod_base = OTHER; note = 2'-O-methylguanosine-3'-phosphate
  modified_base 4: mod_base = OTHER; note = 2'-O-methyluridine-3'-phosphate
  modified_base 5: mod_base = OTHER; note = 2'-O-methyladenosine-3'-phosphate
  modified_base 6: mod_base = OTHER; note = 2'-O-hexadecyl-cytidine-3'-phosphate
  modified_base 7: mod_base = OTHER; note = 2'-deoxy-2'-fluoroadenosine-3'-phosphate
  modified_base 8: mod_base = OTHER; note = 2'-O-methyluridine-3'-phosphate
  modified_base 9: mod_base = OTHER; note = 2'-deoxy-2'-fluoroguanosine-3'-phosphate
  modified_base 10: mod_base = OTHER; note = 2'-deoxy-2'-fluorouridine-3'-phosphate
  modified_base 11: mod_base = OTHER; note = 2'-deoxy-2'-fluoroadenosine-3'-phosphate
  modified_base 12: mod_base = OTHER; note = 2'-O-methylcytidine-3'-phosphate
  modified_base 13: mod_base = OTHER; note = 2'-O-methylcytidine-3'-phosphate
  modified_base 14: mod_base = OTHER; note = 2'-O-methyladenosine-3'-phosphate
  modified_base 15: mod_base = OTHER; note = 2'-O-methylguanosine-3'-phosphate
  modified_base 16: mod_base = OTHER; note = 2'-O-methylcytidine-3'-phosphate
  modified_base 17: mod_base = OTHER; note = 2'-O-methyluridine-3'-phosphate
  modified_base 18: mod_base = OTHER; note = 2'-O-methylcytidine-3'-phosphate
  modified_base 19: mod_base = OTHER; note = 2'-O-methyluridine-3'-phosphorothioate
  modified_base 20: mod_base = OTHER; note = 2'-O-methyluridine-3'-phosphorothioate
  modified_base 21: mod_base = OTHER; note = 2'-O-methyladenosine
gtgtacatgtaccagctctta

SEQ ID NO: 549 - RNA, 21 nt, synthetic construct
  source 1..21: mol_type = other RNA
  modified_base 1: mod_base = OTHER; note = 2'-O-methyluridine-3'-phosphorothioate
  modified_base 2: mod_base = OTHER; note = 2'-O-methylguanosine-3'-phosphorothioate
  modified_base 3: mod_base = OTHER; note = 2'-O-methyluridine-3'-phosphate
  modified_base 4: mod_base = OTHER; note = 2'-O-methylcytidine-3'-phosphate
  modified_base 5: mod_base = OTHER; note = 2'-O-methyladenosine-3'-phosphate
  modified_base 6: mod_base = OTHER; note = 2'-O-hexadecyl-cytidine-3'-phosphate
  modified_base 7: mod_base = OTHER; note = 2'-deoxy-2'-fluorocytidine-3'-phosphate
  modified_base 8: mod_base = OTHER; note = 2'-O-methylguanosine-3'-phosphate
  modified_base 9: mod_base = OTHER; note = 2'-deoxy-2'-fluorocytidine-3'-phosphate
  modified_base 10: mod_base = OTHER; note = 2'-deoxy-2'-fluoroguanosine-3'-phosphate
  modified_base 11: mod_base = OTHER; note = 2'-deoxy-2'-fluoroadenosine-3'-phosphate
  modified_base 12: mod_base = OTHER; note = 2'-O-methylcytidine-3'-phosphate
  modified_base 13: mod_base = OTHER; note = 2'-O-methyladenosine-3'-phosphate
  modified_base 14: mod_base = OTHER; note = 2'-O-methyluridine-3'-phosphate
  modified_base 15: mod_base = OTHER; note = 2'-O-methylcytidine-3'-phosphate
  modified_base 16: mod_base = OTHER; note = 2'-O-methyladenosine-3'-phosphate
  modified_base 17: mod_base = OTHER; note = 2'-O-methyladenosine-3'-phosphate
  modified_base 18: mod_base = OTHER; note = 2'-O-methylguanosine-3'-phosphate
  modified_base 19: mod_base = OTHER; note = 2'-O-methylcytidine-3'-phosphorothioate
  modified_base 20: mod_base = OTHER; note = 2'-O-methylcytidine-3'-phosphorothioate
  modified_base 21: mod_base = OTHER; note = 2'-O-methyladenosine
tgtcaccgcgacatcaagcca

SEQ ID NO: 550 - RNA, 21 nt, synthetic construct
  source 1..21: mol_type = other RNA
  modified_base 1: mod_base = OTHER; note = 2'-O-methyluridine-3'-phosphorothioate
  modified_base 2: mod_base = OTHER; note = 2'-O-methyluridine-3'-phosphorothioate
  modified_base 3: mod_base = OTHER; note = 2'-O-methylguanosine-3'-phosphate
  modified_base 4: mod_base = OTHER; note = 2'-O-methylguanosine-3'-phosphate
  modified_base 5: mod_base = OTHER; note = 2'-O-methylcytidine-3'-phosphate
  modified_base 6: mod_base = OTHER; note = 2'-O-hexadecyl-cytidine-3'-phosphate
  modified_base 7: mod_base = OTHER; note = 2'-deoxy-2'-fluorouridine-3'-phosphate
  modified_base 8: mod_base = OTHER; note = 2'-O-methyladenosine-3'-phosphate
  modified_base 9: mod_base = OTHER; note = 2'-deoxy-2'-fluorocytidine-3'-phosphate
  modified_base 10: mod_base = OTHER; note = 2'-deoxy-2'-fluoroadenosine-3'-phosphate
  modified_base 11: mod_base = OTHER; note = 2'-deoxy-2'-fluorouridine-3'-phosphate
  modified_base 12: mod_base = OTHER; note = 2'-O-methylcytidine-3'-phosphate
  modified_base 13: mod_base = OTHER; note = 2'-O-methylcytidine-3'-phosphate
  modified_base 14: mod_base = OTHER; note = 2'-O-methyladenosine-3'-phosphate
  modified_base 15: mod_base = OTHER; note = 2'-O-methylcytidine-3'-phosphate
  modified_base 16: mod_base = OTHER; note = 2'-O-methyluridine-3'-phosphate
  modified_base 17: mod_base = OTHER; note = 2'-O-methylcytidine-3'-phosphate
  modified_base 18: mod_base = OTHER; note = 2'-O-methylcytidine-3'-phosphate
  modified_base 19: mod_base = OTHER; note = 2'-O-methylcytidine-3'-phosphorothioate
  modified_base 20: mod_base = OTHER; note = 2'-O-methyladenosine-3'-phosphorothioate
  modified_base 21: mod_base = OTHER; note = 2'-O-methyladenosine
ttggcctacatccactcccaa

SEQ ID NO: 551 - RNA, 21 nt, synthetic construct
  source 1..21: mol_type = other RNA
  modified_base 1: mod_base = OTHER; note = 2'-O-methylcytidine-3'-phosphorothioate
  modified_base 2: mod_base = OTHER; note = 2'-O-methyladenosine-3'-phosphorothioate
  modified_base 3: mod_base = OTHER; note = 2'-O-methylguanosine-3'-phosphate
  modified_base 4: mod_base = OTHER; note = 2'-O-methyluridine-3'-phosphate
  modified_base 5: mod_base = OTHER; note = 2'-O-methylguanosine-3'-phosphate
  modified_base 6: mod_base = OTHER; note = 2'-O-hexadecyl-cytidine-3'-phosphate
  modified_base 7: mod_base = OTHER; note = 2'-deoxy-2'-fluoroadenosine-3'-phosphate
  modified_base 8: mod_base = OTHER; note = 2'-O-methyladenosine-3'-phosphate
  modified_base 9: mod_base = OTHER; note = 2'-deoxy-2'-fluoroadenosine-3'-phosphate
  modified_base 10: mod_base = OTHER; note = 2'-deoxy-2'-fluoroguanosine-3'-phosphate
  modified_base 11: mod_base = OTHER; note = 2'-deoxy-2'-fluorocytidine-3'-phosphate
  modified_base 12: mod_base = OTHER; note = 2'-O-methyladenosine-3'-phosphate
  modified_base 13: mod_base = OTHER; note = 2'-O-methylguanosine-3'-phosphate
  modified_base 14: mod_base = OTHER; note = 2'-O-methyluridine-3'-phosphate
  modified_base 15: mod_base = OTHER; note = 2'-O-methyluridine-3'-phosphate
  modified_base 16: mod_base = OTHER; note = 2'-O-methylguanosine-3'-phosphate
  modified_base 17: mod_base = OTHER; note = 2'-O-methylguanosine-3'-phosphate
  modified_base 18: mod_base = OTHER; note = 2'-O-methyluridine-3'-phosphate
  modified_base 19: mod_base = OTHER; note = 2'-O-methylcytidine-3'-phosphorothioate
  modified_base 20: mod_base = OTHER; note = 2'-O-methylcytidine-3'-phosphorothioate
  modified_base 21: mod_base = OTHER; note = 2'-O-methyladenosine
cagtgcaaagcagttggtcca

SEQ ID NO: 552 - RNA, 21 nt, synthetic construct
  source 1..21: mol_type = other RNA
  modified_base 1: mod_base = OTHER; note = 2'-O-methyladenosine-3'-phosphorothioate
  modified_base 2: mod_base = OTHER; note = 2'-O-methylcytidine-3'-phosphorothioate
  modified_base 3: mod_base = OTHER; note = 2'-O-methylcytidine-3'-phosphate
  modified_base 4: mod_base = OTHER; note = 2'-O-methylcytidine-3'-phosphate
  modified_base 5: mod_base = OTHER; note = 2'-O-methyluridine-3'-phosphate
  modified_base 6: mod_base = OTHER; note = 2'-O-hexadecyl-guanosine-3'-phosphate
  modified_base 7: mod_base = OTHER; note = 2'-deoxy-2'-fluoroadenosine-3'-phosphate
  modified_base 8: mod_base = OTHER; note = 2'-O-methylcytidine-3'-phosphate
  modified_base 9: mod_base = OTHER; note = 2'-deoxy-2'-fluoroadenosine-3'-phosphate
  modified_base 10: mod_base = OTHER; note = 2'-deoxy-2'-fluorocytidine-3'-phosphate
  modified_base 11: mod_base = OTHER; note = 2'-deoxy-2'-fluorouridine-3'-phosphate
  modified_base 12: mod_base = OTHER; note = 2'-O-methylguanosine-3'-phosphate
  modified_base 13: mod_base = OTHER; note = 2'-O-methylcytidine-3'-phosphate
  modified_base 14: mod_base = OTHER; note = 2'-O-methyluridine-3'-phosphate
  modified_base 15: mod_base = OTHER; note = 2'-O-methylguanosine-3'-phosphate
  modified_base 16: mod_base = OTHER; note = 2'-O-methyluridine-3'-phosphate
  modified_base 17: mod_base = OTHER; note = 2'-O-methylcytidine-3'-phosphate
  modified_base 18: mod_base = OTHER; note = 2'-O-methylcytidine-3'-phosphate
  modified_base 19: mod_base = OTHER; note = 2'-O-methyluridine-3'-phosphorothioate
  modified_base 20: mod_base = OTHER; note = 2'-O-methylcytidine-3'-phosphorothioate
  modified_base 21: mod_base = OTHER; note = 2'-O-methyladenosine
accctgacactgctgtcctca

SEQ ID NO: 553 - RNA, 21 nt, synthetic construct
  source 1..21: mol_type = other RNA
  modified_base 1: mod_base = OTHER; note = 2'-O-methylcytidine-3'-phosphorothioate
  modified_base 2: mod_base = OTHER; note = 2'-O-methyladenosine-3'-phosphorothioate
  modified_base 3: mod_base = OTHER; note = 2'-O-methylcytidine-3'-phosphate
  modified_base 4: mod_base = OTHER; note = 2'-O-methyluridine-3'-phosphate
  modified_base 5: mod_base = OTHER; note = 2'-O-methylguanosine-3'-phosphate
  modified_base 6: mod_base = OTHER; note = 2'-O-hexadecyl-cytidine-3'-phosphate
  modified_base 7: mod_base = OTHER; note = 2'-deoxy-2'-fluorouridine-3'-phosphate
  modified_base 8: mod_base = OTHER; note = 2'-O-methylguanosine-3'-phosphate
  modified_base 9: mod_base = OTHER; note = 2'-deoxy-2'-fluorouridine-3'-phosphate
  modified_base 10: mod_base = OTHER; note = 2'-deoxy-2'-fluorocytidine-3'-phosphate
  modified_base 11: mod_base = OTHER; note = 2'-deoxy-2'-fluorocytidine-3'-phosphate
  modified_base 12: mod_base = OTHER; note = 2'-O-methyluridine-3'-phosphate
  modified_base 13: mod_base = OTHER; note = 2'-O-methylcytidine-3'-phosphate
  modified_base 14: mod_base = OTHER; note = 2'-O-methyladenosine-3'-phosphate
  modified_base 15: mod_base = OTHER; note = 2'-O-methyladenosine-3'-phosphate
  modified_base 16: mod_base = OTHER; note = 2'-O-methylguanosine-3'-phosphate
  modified_base 17: mod_base = OTHER; note = 2'-O-methylcytidine-3'-phosphate
  modified_base 18: mod_base = OTHER; note = 2'-O-methyluridine-3'-phosphate
  modified_base 19: mod_base = OTHER; note = 2'-O-methylcytidine-3'-phosphorothioate
  modified_base 20: mod_base = OTHER; note = 2'-O-methyluridine-3'-phosphorothioate
  modified_base 21: mod_base = OTHER; note = 2'-O-methyladenosine
cactgctgtcctcaagctcta

SEQ ID NO: 554 - RNA, 21 nt, synthetic construct
  source 1..21: mol_type = other RNA
  modified_base 1: mod_base = OTHER; note = 2'-O-methylguanosine-3'-phosphorothioate
  modified_base 2: mod_base = OTHER; note = 2'-O-methyladenosine-3'-phosphorothioate
  modified_base 3: mod_base = OTHER; note = 2'-O-methylguanosine-3'-phosphate
  modified_base 4: mod_base = OTHER; note = 2'-O-methylcytidine-3'-phosphate
  modified_base 5: mod_base = OTHER; note = 2'-O-methylcytidine-3'-phosphate
  modified_base 6: mod_base = OTHER; note = 2'-O-hexadecyl-cytidine-3'-phosphate
  modified_base 7: mod_base = OTHER; note = 2'-deoxy-2'-fluoroadenosine-3'-phosphate
  modified_base 8: mod_base = OTHER; note = 2'-O-methyladenosine-3'-phosphate
  modified_base 9: mod_base = OTHER; note = 2'-deoxy-2'-fluorouridine-3'-phosphate
  modified_base 10: mod_base = OTHER; note = 2'-deoxy-2'-fluoroguanosine-3'-phosphate
  modified_base 11: mod_base = OTHER; note = 2'-deoxy-2'-fluorouridine-3'-phosphate
  modified_base 12: mod_base = OTHER; note = 2'-O-methylcytidine-3'-phosphate
  modified_base 13: mod_base = OTHER; note = 2'-O-methyluridine-3'-phosphate
  modified_base 14: mod_base = OTHER; note = 2'-O-methylcytidine-3'-phosphate
  modified_base 15: mod_base = OTHER; note = 2'-O-methylcytidine-3'-phosphate
  modified_base 16: mod_base = OTHER; note = 2'-O-methyluridine-3'-phosphate
  modified_base 17: mod_base = OTHER; note = 2'-O-methyladenosine-3'-phosphate
  modified_base 18: mod_base = OTHER; note = 2'-O-methylcytidine-3'-phosphate
  modified_base 19: mod_base = OTHER; note = 2'-O-methyladenosine-3'-phosphorothioate
  modified_base 20: mod_base = OTHER; note = 2'-O-methyluridine-3'-phosphorothioate
  modified_base 21: mod_base = OTHER; note = 2'-O-methyladenosine
gagcccaatgtctcctacata

SEQ ID NO: 555 - RNA, 21 nt, synthetic construct
  source 1..21: mol_type = other RNA
  modified_base 1: mod_base = OTHER; note = 2'-O-methyluridine-3'-phosphorothioate
  modified_base 2: mod_base = OTHER; note = 2'-O-methylguanosine-3'-phosphorothioate
  modified_base 3: mod_base = OTHER; note = 2'-O-methyluridine-3'-phosphate
  modified_base 4: mod_base = OTHER; note = 2'-O-methylcytidine-3'-phosphate
  modified_base 5: mod_base = OTHER; note = 2'-O-methylcytidine-3'-phosphate
  modified_base 6: mod_base = OTHER; note = 2'-O-hexadecyl-uridine-3'-phosphate
  modified_base 7: mod_base = OTHER; note = 2'-deoxy-2'-fluorocytidine-3'-phosphate
  modified_base 8: mod_base = OTHER; note = 2'-O-methyladenosine-3'-phosphate
  modified_base 9: mod_base = OTHER; note = 2'-deoxy-2'-fluoroadenosine-3'-phosphate
  modified_base 10: mod_base = OTHER; note = 2'-deoxy-2'-fluoroguanosine-3'-phosphate
  modified_base 11: mod_base = OTHER; note = 2'-deoxy-2'-fluorocytidine-3'-phosphate
  modified_base 12: mod_base = OTHER; note = 2'-O-methyluridine-3'-phosphate
  modified_base 13: mod_base = OTHER; note = 2'-O-methylcytidine-3'-phosphate
  modified_base 14: mod_base = OTHER; note = 2'-O-methyluridine-3'-phosphate
  modified_base 15: mod_base = OTHER; note = 2'-O-methylguanosine-3'-phosphate
  modified_base 16: mod_base = OTHER; note = 2'-O-methylcytidine-3'-phosphate
  modified_base 17: mod_base = OTHER; note = 2'-O-methylguanosine-3'-phosphate
  modified_base 18: mod_base = OTHER; note = 2'-O-methyladenosine-3'-phosphate
  modified_base 19: mod_base = OTHER; note = 2'-O-methyluridine-3'-phosphorothioate
  modified_base 20: mod_base = OTHER; note = 2'-O-methyluridine-3'-phosphorothioate
  modified_base 21: mod_base = OTHER; note = 2'-O-methyladenosine
tgtcctcaagctctgcgatta

SEQ ID NO: 556 - RNA, 21 nt, synthetic construct
  source 1..21: mol_type = other RNA
  modified_base 1: mod_base = OTHER; note = 2'-O-methyladenosine-3'-phosphorothioate
  modified_base 2: mod_base = OTHER; note = 2'-O-methyladenosine-3'-phosphorothioate
  modified_base 3: mod_base = OTHER; note = 2'-O-methyluridine-3'-phosphate
  modified_base 4: mod_base = OTHER; note = 2'-O-methylguanosine-3'-phosphate
  modified_base 5: mod_base = OTHER; note = 2'-O-methyluridine-3'-phosphate
  modified_base 6: mod_base = OTHER; note = 2'-O-hexadecyl-cytidine-3'-phosphate
  modified_base 7: mod_base = OTHER; note = 2'-deoxy-2'-fluorouridine-3'-phosphate
  modified_base 8: mod_base = OTHER; note = 2'-O-methylcytidine-3'-phosphate
  modified_base 9: mod_base = OTHER; note = 2'-deoxy-2'-fluorocytidine-3'-phosphate
  modified_base 10: mod_base = OTHER; note = 2'-deoxy-2'-fluorouridine-3'-phosphate
  modified_base 11: mod_base = OTHER; note = 2'-deoxy-2'-fluoroadenosine-3'-phosphate
  modified_base 12: mod_base = OTHER; note = 2'-O-methylcytidine-3'-phosphate
  modified_base 13: mod_base = OTHER; note = 2'-O-methyladenosine-3'-phosphate
  modified_base 14: mod_base = OTHER; note = 2'-O-methyluridine-3'-phosphate
  modified_base 15: mod_base = OTHER; note = 2'-O-methylcytidine-3'-phosphate
  modified_base 16: mod_base = OTHER; note = 2'-O-methyluridine-3'-phosphate
  modified_base 17: mod_base = OTHER; note = 2'-O-methylguanosine-3'-phosphate
  modified_base 18: mod_base = OTHER; note = 2'-O-methyluridine-3'-phosphate
  modified_base 19: mod_base = OTHER; note = 2'-O-methyluridine-3'-phosphorothioate
  modified_base 20: mod_base = OTHER; note = 2'-O-methylcytidine-3'-phosphorothioate
  modified_base 21: mod_base = OTHER; note = 2'-O-methyladenosine
aatgtctcctacatctgttca

SEQ ID NO: 557 - RNA, 21 nt, synthetic construct
  source 1..21: mol_type = other RNA
  modified_base 1: mod_base = OTHER; note = 2'-O-methyladenosine-3'-phosphorothioate
  modified_base 2: mod_base = OTHER; note = 2'-O-methyladenosine-3'-phosphorothioate
  modified_base 3: mod_base = OTHER; note = 2'-O-methylguanosine-3'-phosphate
  modified_base 4: mod_base = OTHER; note = 2'-O-methylcytidine-3'-phosphate
  modified_base 5: mod_base = OTHER; note = 2'-O-methyluridine-3'-phosphate
  modified_base 6: mod_base = OTHER; note = 2'-O-hexadecyl-cytidine-3'-phosphate
  modified_base 7: mod_base = OTHER; note = 2'-deoxy-2'-fluorouridine-3'-phosphate
  modified_base 8: mod_base = OTHER; note = 2'-O-methylguanosine-3'-phosphate
  modified_base 9: mod_base = OTHER; note = 2'-deoxy-2'-fluorocytidine-3'-phosphate
  modified_base 10: mod_base = OTHER; note = 2'-deoxy-2'-fluoroguanosine-3'-phosphate
  modified_base 11: mod_base = OTHER; note = 2'-deoxy-2'-fluoroadenosine-3'-phosphate
  modified_base 12: mod_base = OTHER; note = 2'-O-methyluridine-3'-phosphate
  modified_base 13: mod_base = OTHER; note = 2'-O-methyluridine-3'-phosphate
  modified_base 14: mod_base = OTHER; note = 2'-O-methyluridine-3'-phosphate
  modified_base 15: mod_base = OTHER; note = 2'-O-methyluridine-3'-phosphate
  modified_base 16: mod_base = OTHER; note = 2'-O-methylguanosine-3'-phosphate
  modified_base 17: mod_base = OTHER; note = 2'-O-methylguanosine-3'-phosphate
  modified_base 18: mod_base = OTHER; note = 2'-O-methylcytidine-3'-phosphate
  modified_base 19: mod_base = OTHER; note = 2'-O-methyladenosine-3'-phosphorothioate
  modified_base 20: mod_base = OTHER; note = 2'-O-methylguanosine-3'-phosphorothioate
  modified_base 21: mod_base = OTHER; note = 2'-O-methyladenosine
aagctctgcgattttggcaga

SEQ ID NO: 558 - RNA, 21 nt, synthetic construct
  source 1..21: mol_type = other RNA
  modified_base 1: mod_base = OTHER; note = 2'-O-methyluridine-3'-phosphorothioate
  modified_base 2: mod_base = OTHER; note = 2'-O-methyladenosine-3'-phosphorothioate
  modified_base 3: mod_base = OTHER; note = 2'-O-methylcytidine-3'-phosphate
  modified_base 4: mod_base = OTHER; note = 2'-O-methyladenosine-3'-phosphate
  modified_base 5: mod_base = OTHER; note = 2'-O-methyluridine-3'-phosphate
  modified_base 6: mod_base = OTHER; note = 2'-O-hexadecyl-cytidine-3'-phosphate
  modified_base 7: mod_base = OTHER; note = 2'-deoxy-2'-fluorouridine-3'-phosphate
  modified_base 8: mod_base = OTHER; note = 2'-O-methylguanosine-3'-phosphate
  modified_base 9: mod_base = OTHER; note = 2'-deoxy-2'-fluorouridine-3'-phosphate
  modified_base 10: mod_base = OTHER; note = 2'-deoxy-2'-fluorouridine-3'-phosphate
  modified_base 11: mod_base = OTHER; note = 2'-deoxy-2'-fluorocytidine-3'-phosphate
  modified_base 12: mod_base = OTHER; note = 2'-O-methyluridine-3'-phosphate
  modified_base 13: mod_base = OTHER; note = 2'-O-methylcytidine-3'-phosphate
  modified_base 14: mod_base = OTHER; note = 2'-O-methylguanosine-3'-phosphate
  modified_base 15: mod_base = OTHER; note = 2'-O-methylcytidine-3'-phosphate
  modified_base 16: mod_base = OTHER; note = 2'-O-methyluridine-3'-phosphate
  modified_base 17: mod_base = OTHER; note = 2'-O-methyladenosine-3'-phosphate
  modified_base 18: mod_base = OTHER; note = 2'-O-methylcytidine-3'-phosphate
  modified_base 19: mod_base = OTHER; note = 2'-O-methyluridine-3'-phosphorothioate
  modified_base 20: mod_base = OTHER; note = 2'-O-methyladenosine-3'-phosphorothioate
  modified_base 21: mod_base = OTHER; note = 2'-O-methyladenosine
tacatctgttctcgctactaa

SEQ ID NO: 559 - RNA, 21 nt, synthetic construct
  source 1..21: mol_type = other RNA
  modified_base 1: mod_base = OTHER; note = 2'-O-methyluridine-3'-phosphorothioate
  modified_base 2: mod_base = OTHER; note = 2'-O-methylguanosine-3'-phosphorothioate
  modified_base 3: mod_base = OTHER; note = 2'-O-methylcytidine-3'-phosphate
  modified_base 4: mod_base = OTHER; note = 2'-O-methylguanosine-3'-phosphate
  modified_base 5: mod_base = OTHER; note = 2'-O-methyladenosine-3'-phosphate
  modified_base 6: mod_base = OTHER; note = 2'-O-hexadecyl-uridine-3'-phosphate
  modified_base 7: mod_base = OTHER; note = 2'-deoxy-2'-fluorouridine-3'-phosphate
  modified_base 8: mod_base = OTHER; note = 2'-O-methyluridine-3'-phosphate
  modified_base 9: mod_base = OTHER; note = 2'-deoxy-2'-fluorouridine-3'-phosphate
  modified_base 10: mod_base = OTHER; note = 2'-deoxy-2'-fluoroguanosine-3'-phosphate
  modified_base 11: mod_base = OTHER; note = 2'-deoxy-2'-fluoroguanosine-3'-phosphate
  modified_base 12: mod_base = OTHER; note = 2'-O-methylcytidine-3'-phosphate
  modified_base 13: mod_base = OTHER; note = 2'-O-methyladenosine-3'-phosphate
  modified_base 14: mod_base = OTHER; note = 2'-O-methylguanosine-3'-phosphate
  modified_base 15: mod_base = OTHER; note = 2'-O-methyluridine-3'-phosphate
  modified_base 16: mod_base = OTHER; note = 2'-O-methylguanosine-3'-phosphate
  modified_base 17: mod_base = OTHER; note = 2'-O-methylcytidine-3'-phosphate
  modified_base 18: mod_base = OTHER; note = 2'-O-methyladenosine-3'-phosphate
  modified_base 19: mod_base = OTHER; note = 2'-O-methyladenosine-3'-phosphorothioate
  modified_base 20: mod_base = OTHER; note = 2'-O-methyladenosine-3'-phosphorothioate
  modified_base 21: mod_base = OTHER; note = 2'-O-methyladenosine
tgcgattttggcagtgcaaaa

SEQ ID NO: 560 - RNA, 21 nt, synthetic construct
  source 1..21: mol_type = other RNA
  modified_base 1: mod_base = OTHER; note = 2'-O-methylguanosine-3'-phosphorothioate
  modified_base 2: mod_base = OTHER; note = 2'-O-methyluridine-3'-phosphorothioate
  modified_base 3: mod_base = OTHER; note = 2'-O-methyluridine-3'-phosphate
  modified_base 4: mod_base = OTHER; note = 2'-O-methylcytidine-3'-phosphate
  modified_base 5: mod_base = OTHER; note = 2'-O-methyluridine-3'-phosphate
  modified_base 6: mod_base = OTHER; note = 2'-O-hexadecyl-cytidine-3'-phosphate
  modified_base 7: mod_base = OTHER; note = 2'-deoxy-2'-fluoroguanosine-3'-phosphate
  modified_base 8: mod_base = OTHER; note = 2'-O-methylcytidine-3'-phosphate
  modified_base 9: mod_base = OTHER; note = 2'-deoxy-2'-fluorouridine-3'-phosphate
  modified_base 10: mod_base = OTHER; note = 2'-deoxy-2'-fluoroadenosine-3'-phosphate
  modified_base 11: mod_base = OTHER; note = 2'-deoxy-2'-fluorocytidine-3'-phosphate
  modified_base 12: mod_base = OTHER; note = 2'-O-methyluridine-3'-phosphate
  modified_base 13: mod_base = OTHER; note = 2'-O-methyladenosine-3'-phosphate
  modified_base 14: mod_base = OTHER; note = 2'-O-methylcytidine-3'-phosphate
  modified_base 15: mod_base = OTHER; note = 2'-O-methylcytidine-3'-phosphate
  modified_base 16: mod_base = OTHER; note = 2'-O-methylguanosine-3'-phosphate
  modified_base 17: mod_base = OTHER; note = 2'-O-methylguanosine-3'-phosphate
  modified_base 18: mod_base = OTHER; note = 2'-O-methylguanosine-3'-phosphate
  modified_base 19: mod_base = OTHER; note = 2'-O-methylcytidine-3'-phosphorothioate
  modified_base 20: mod_base = OTHER; note = 2'-O-methylcytidine-3'-phosphorothioate
  modified_base 21: mod_base = OTHER; note = 2'-O-methyladenosine
gttctcgctactaccgggcca

SEQ ID NO: 561 - RNA, 21 nt, synthetic construct
  source 1..21: mol_type = other RNA
  modified_base 1: mod_base = OTHER; note = 2'-O-methyladenosine-3'-phosphorothioate
  modified_base 2: mod_base = OTHER; note = 2'-O-methylguanosine-3'-phosphorothioate
  modified_base 3: mod_base = OTHER; note = 2'-O-methylcytidine-3'-phosphate
  modified_base 4: mod_base = OTHER; note = 2'-O-methyluridine-3'-phosphate
  modified_base 5: mod_base = OTHER; note = 2'-O-methylcytidine-3'-phosphate
  modified_base 6: mod_base = OTHER; note = 2'-O-hexadecyl-adenosine-3'-phosphate
  modified_base 7: mod_base = OTHER; note = 2'-deoxy-2'-fluorouridine-3'-phosphate
  modified_base 8: mod_base = OTHER; note = 2'-O-methylcytidine-3'-phosphate
  modified_base 9: mod_base = OTHER; note = 2'-deoxy-2'-fluorouridine-3'-phosphate
  modified_base 10: mod_base = OTHER; note = 2'-deoxy-2'-fluorouridine-3'-phosphate
  modified_base 11: mod_base = OTHER; note = 2'-deoxy-2'-fluorouridine-3'-phosphate
  modified_base 12: mod_base = OTHER; note = 2'-O-methylguanosine-3'-phosphate
  modified_base 13: mod_base = OTHER; note = 2'-O-methylguanosine-3'-phosphate
  modified_base 14: mod_base = OTHER; note = 2'-O-methyladenosine-3'-phosphate
  modified_base 15: mod_base = OTHER; note = 2'-O-methylguanosine-3'-phosphate
  modified_base 16: mod_base = OTHER; note = 2'-O-methylcytidine-3'-phosphate
  modified_base 17: mod_base = OTHER; note = 2'-O-methylcytidine-3'-phosphate
  modified_base 18: mod_base = OTHER; note = 2'-O-methyladenosine-3'-phosphate
  modified_base 19: mod_base = OTHER; note = 2'-O-methylcytidine-3'-phosphorothioate
  modified_base 20: mod_base = OTHER; note = 2'-O-methyluridine-3'-phosphorothioate
  modified_base 21: mod_base = OTHER; note = 2'-O-methyladenosine
agctcatctttggagccacta

SEQ ID NO: 562 - RNA, 21 nt, synthetic construct
  source 1..21: mol_type = other RNA
  modified_base 1: mod_base = OTHER; note = 2'-O-methyluridine-3'-phosphorothioate
  modified_base 2: mod_base = OTHER; note = 2'-O-methylcytidine-3'-phosphorothioate
  modified_base 3: mod_base = OTHER; note = 2'-O-methyluridine-3'-phosphate
  modified_base 4: mod_base = OTHER; note = 2'-O-methyluridine-3'-phosphate
  modified_base 5: mod_base = OTHER; note = 2'-O-methyluridine-3'-phosphate
  modified_base 6: mod_base = OTHER; note = 2'-O-hexadecyl-guanosine-3'-phosphate
  modified_base 7: mod_base = OTHER; note = 2'-deoxy-2'-fluoroguanosine-3'-phosphate
  modified_base 8: mod_base = OTHER; note = 2'-O-methyladenosine-3'-phosphate
  modified_base 9: mod_base = OTHER; note = 2'-deoxy-2'-fluoroguanosine-3'-phosphate
  modified_base 10: mod_base = OTHER; note = 2'-deoxy-2'-fluorocytidine-3'-phosphate
  modified_base 11: mod_base = OTHER; note = 2'-deoxy-2'-fluorocytidine-3'-phosphate
  modified_base 12: mod_base = OTHER; note = 2'-O-methyladenosine-3'-phosphate
  modified_base 13: mod_base = OTHER; note = 2'-O-methylcytidine-3'-phosphate
  modified_base 14: mod_base = OTHER; note = 2'-O-methyluridine-3'-phosphate
  modified_base 15: mod_base = OTHER; note = 2'-O-methylguanosine-3'-phosphate
  modified_base 16: mod_base = OTHER; note = 2'-O-methyladenosine-3'-phosphate
  modified_base 17: mod_base = OTHER; note = 2'-O-methyluridine-3'-phosphate
  modified_base 18: mod_base = OTHER; note = 2'-O-methyluridine-3'-phosphate
  modified_base 19: mod_base = OTHER; note = 2'-O-methyladenosine-3'-phosphorothioate
  modified_base 20: mod_base = OTHER; note = 2'-O-methylcytidine-3'-phosphorothioate
  modified_base 21: mod_base = OTHER; note = 2'-O-methyladenosine
tctttggagccactgattaca

SEQ ID NO: 563 - RNA, 21 nt, synthetic construct
  source 1..21: mol_type = other RNA
  modified_base 1: mod_base = OTHER; note = 2'-O-methylguanosine-3'-phosphorothioate
  modified_base 2: mod_base = OTHER; note = 2'-O-methyladenosine-3'-phosphorothioate
  modified_base 3: mod_base = OTHER; note = 2'-O-methylguanosine-3'-phosphate
  modified_base 4: mod_base = OTHER; note = 2'-O-methylcytidine-3'-phosphate
  modified_base 5: mod_base = OTHER; note = 2'-O-methylcytidine-3'-phosphate
  modified_base 6: mod_base = OTHER; note = 2'-O-hexadecyl-adenosine-3'-phosphate
  modified_base 7: mod_base = OTHER; note = 2'-deoxy-2'-fluorocytidine-3'-phosphate
  modified_base 8: mod_base = OTHER; note = 2'-O-methyluridine-3'-phosphate
  modified_base 9: mod_base = OTHER; note = 2'-deoxy-2'-fluoroguanosine-3'-phosphate
  modified_base 10: mod_base = OTHER; note = 2'-deoxy-2'-fluoroadenosine-3'-phosphate
  modified_base 11: mod_base = OTHER; note = 2'-deoxy-2'-fluorouridine-3'-phosphate
  modified_base 12: mod_base = OTHER; note = 2'-O-methyluridine-3'-phosphate
  modified_base 13: mod_base = OTHER; note = 2'-O-methyladenosine-3'-phosphate
  modified_base 14: mod_base = OTHER; note = 2'-O-methylcytidine-3'-phosphate
  modified_base 15: mod_base = OTHER; note = 2'-O-methyladenosine-3'-phosphate
  modified_base 16: mod_base = OTHER; note = 2'-O-methylcytidine-3'-phosphate
  modified_base 17: mod_base = OTHER; note = 2'-O-methylcytidine-3'-phosphate
  modified_base 18: mod_base = OTHER; note = 2'-O-methyluridine-3'-phosphate
  modified_base 19: mod_base = OTHER; note = 2'-O-methylcytidine-3'-phosphorothioate
  modified_base 20: mod_base = OTHER; note = 2'-O-methyladenosine-3'-phosphorothioate
  modified_base 21: mod_base = OTHER; note = 2'-O-methyladenosine
gagccactgattacacctcaa

SEQ ID NO: 564 - RNA, 21 nt, synthetic construct
  source 1..21: mol_type = other RNA
  modified_base 1: mod_base = OTHER; note = 2'-O-methyluridine-3'-phosphorothioate
  modified_base 2: mod_base = OTHER; note = 2'-O-methylguanosine-3'-phosphorothioate
  modified_base 3: mod_base = OTHER; note = 2'-O-methyladenosine-3'-phosphate
  modified_base 4: mod_base = OTHER; note = 2'-O-methyluridine-3'-phosphate
  modified_base 5: mod_base = OTHER; note = 2'-O-methyluridine-3'-phosphate
  modified_base 6: mod_base = OTHER; note = 2'-O-hexadecyl-adenosine-3'-phosphate
  modified_base 7: mod_base = OTHER; note = 2'-deoxy-2'-fluorocytidine-3'-phosphate
  modified_base 8: mod_base = OTHER; note = 2'-O-methyladenosine-3'-phosphate
  modified_base 9: mod_base = OTHER; note = 2'-deoxy-2'-fluorocytidine-3'-phosphate
  modified_base 10: mod_base = OTHER; note = 2'-deoxy-2'-fluorocytidine-3'-phosphate
  modified_base 11: mod_base = OTHER; note = 2'-deoxy-2'-fluorouridine-3'-phosphate
  modified_base 12: mod_base = OTHER; note = 2'-O-methylcytidine-3'-phosphate
  modified_base 13: mod_base = OTHER; note = 2'-O-methyladenosine-3'-phosphate
  modified_base 14: mod_base = OTHER; note = 2'-O-methyluridine-3'-phosphate
  modified_base 15: mod_base = OTHER; note = 2'-O-methylcytidine-3'-phosphate
  modified_base 16: mod_base = OTHER; note = 2'-O-methylcytidine-3'-phosphate
  modified_base 17: mod_base = OTHER; note = 2'-O-methyladenosine-3'-phosphate
  modified_base 18: mod_base = OTHER; note = 2'-O-methyluridine-3'-phosphate
  modified_base 19: mod_base = OTHER; note = 2'-O-methylcytidine-3'-phosphorothioate
  modified_base 20: mod_base = OTHER; note = 2'-O-methylguanosine-3'-phosphorothioate
  modified_base 21: mod_base = OTHER; note = 2'-O-methyladenosine
tgattacacctcatccatcga

SEQ ID NO: 565 - RNA, 21 nt, synthetic construct
  source 1..21: mol_type = other RNA
  modified_base 1: mod_base = OTHER; note = 2'-O-methylcytidine-3'-phosphorothioate
  modified_base 2: mod_base = OTHER; note = 2'-O-methyladenosine-3'-phosphorothioate
  modified_base 3: mod_base = OTHER; note = 2'-O-methylcytidine-3'-phosphate
  modified_base 4: mod_base = OTHER; note = 2'-O-methylcytidine-3'-phosphate
  modified_base 5: mod_base = OTHER; note = 2'-O-methyluridine-3'-phosphate
  modified_base 6: mod_base = OTHER; note = 2'-O-hexadecyl-cytidine-3'-phosphate
  modified_base 7: mod_base = OTHER; note = 2'-deoxy-2'-fluoroadenosine-3'-phosphate
  modified_base 8: mod_base = OTHER; note = 2'-O-methyluridine-3'-phosphate
  modified_base 9: mod_base = OTHER; note = 2'-deoxy-2'-fluorocytidine-3'-phosphate
  modified_base 10: mod_base = OTHER; note = 2'-deoxy-2'-fluorocytidine-3'-phosphate
  modified_base 11: mod_base = OTHER; note = 2'-deoxy-2'-fluoroadenosine-3'-phosphate
  modified_base 12: mod_base = OTHER; note = 2'-O-methyluridine-3'-phosphate
  modified_base 13: mod_base = OTHER; note = 2'-O-methylcytidine-3'-phosphate
  modified_base 14: mod_base = OTHER; note = 2'-O-methylguanosine-3'-phosphate
  modified_base 15: mod_base = OTHER; note = 2'-O-methyladenosine-3'-phosphate
  modified_base 16: mod_base = OTHER; note = 2'-O-methyluridine-3'-phosphate
  modified_base 17: mod_base = OTHER; note = 2'-O-methylguanosine-3'-phosphate
  modified_base 18: mod_base = OTHER; note = 2'-O-methyluridine-3'-phosphate
  modified_base 19: mod_base = OTHER; note = 2'-O-methyluridine-3'-phosphorothioate
  modified_base 20: mod_base = OTHER; note = 2'-O-methyluridine-3'-phosphorothioate
  modified_base 21: mod_base = OTHER; note = 2'-O-methyladenosine
cacctcatccatcgatgttta

SEQ ID NO: 566 - RNA, 21 nt, synthetic construct
  source 1..21: mol_type = other RNA
  modified_base 1: mod_base = OTHER; note = 2'-O-methyladenosine-3'-phosphorothioate
  modified_base 2: mod_base = OTHER; note = 2'-O-methyluridine-3'-phosphorothioate
  modified_base 3: mod_base = OTHER; note = 2'-O-methylcytidine-3'-phosphate
  modified_base 4: mod_base = OTHER; note = 2'-O-methylcytidine-3'-phosphate
  modified_base 5: mod_base = OTHER; note = 2'-O-methyladenosine-3'-phosphate
  modified_base 6: mod_base = OTHER; note = 2'-O-hexadecyl-uridine-3'-phosphate
  modified_base 7: mod_base = OTHER; note = 2'-deoxy-2'-fluorocytidine-3'-phosphate
  modified_base 8: mod_base = OTHER; note = 2'-O-methylguanosine-3'-phosphate
  modified_base 9: mod_base = OTHER; note = 2'-deoxy-2'-fluoroadenosine-3'-phosphate
  modified_base 10: mod_base = OTHER; note = 2'-deoxy-2'-fluorouridine-3'-phosphate
  modified_base 11: mod_base = OTHER; note = 2'-deoxy-2'-fluoroguanosine-3'-phosphate
  modified_base 12: mod_base = OTHER; note = 2'-O-methyluridine-3'-phosphate
  modified_base 13: mod_base = OTHER; note = 2'-O-methyluridine-3'-phosphate
  modified_base 14: mod_base = OTHER; note = 2'-O-methyluridine-3'-phosphate
  modified_base 15: mod_base = OTHER; note = 2'-O-methylguanosine-3'-phosphate
  modified_base 16: mod_base = OTHER; note = 2'-O-methylguanosine-3'-phosphate
  modified_base 17: mod_base = OTHER; note = 2'-O-methyluridine-3'-phosphate
  modified_base 18: mod_base = OTHER; note = 2'-O-methylcytidine-3'-phosphate
  modified_base 19: mod_base = OTHER; note = 2'-O-methyladenosine-3'-phosphorothioate
  modified_base 20: mod_base = OTHER; note = 2'-O-methylguanosine-3'-phosphorothioate
  modified_base 21: mod_base = OTHER; note = 2'-O-methyladenosine
atccatcgatgtttggtcaga

SEQ ID NO: 567 - RNA, 21 nt, synthetic construct
  source 1..21: mol_type = other RNA
  modified_base 1: mod_base = OTHER; note = 2'-O-methylguanosine-3'-phosphorothioate
  modified_base 2: mod_base = OTHER; note = 2'-O-methylcytidine-3'-phosphorothioate
  modified_base 3: mod_base = OTHER; note = 2'-O-methyluridine-3'-phosphate
  modified_base 4: mod_base = OTHER; note = 2'-O-methylguanosine-3'-phosphate
  modified_base 5: mod_base = OTHER; note = 2'-O-methylguanosine-3'-phosphate
  modified_base 6: mod_base = OTHER; note = 2'-O-hexadecyl-cytidine-3'-phosphate
  modified_base 7: mod_base = OTHER; note = 2'-deoxy-2'-fluorouridine-3'-phosphate
  modified_base 8: mod_base = OTHER; note = 2'-O-methylguanosine-3'-phosphate
  modified_base 9: mod_base = OTHER; note = 2'-deoxy-2'-fluorouridine-3'-phosphate
  modified_base 10: mod_base = OTHER; note = 2'-deoxy-2'-fluoroguanosine-3'-phosphate
  modified_base 11: mod_base = OTHER; note = 2'-deoxy-2'-fluorouridine-3'-phosphate
  modified_base 12: mod_base = OTHER; note = 2'-O-methyladenosine-3'-phosphate
  modified_base 13: mod_base = OTHER; note = 2'-O-methylcytidine-3'-phosphate
  modified_base 14: mod_base = OTHER; note = 2'-O-methyluridine-3'-phosphate
  modified_base 15: mod_base = OTHER; note = 2'-O-methylguanosine-3'-phosphate
  modified_base 16: mod_base = OTHER; note = 2'-O-methylguanosine-3'-phosphate
  modified_base 17: mod_base = OTHER; note = 2'-O-methylcytidine-3'-phosphate
  modified_base 18: mod_base = OTHER; note = 2'-O-methyladenosine-3'-phosphate
  modified_base 19: mod_base = OTHER; note = 2'-O-methylguanosine-3'-phosphorothioate
  modified_base 20: mod_base = OTHER; note = 2'-O-methyladenosine-3'-phosphorothioate
  modified_base 21: mod_base = OTHER; note = 2'-O-methyladenosine
gctggctgtgtactggcagaa

SEQ ID NO: 568 - RNA, 21 nt, synthetic construct
  source 1..21: mol_type = other RNA
  modified_base 1: mod_base = OTHER; note = 2'-O-methyluridine-3'-phosphorothioate
  modified_base 2: mod_base = OTHER; note = 2'-O-methyladenosine-3'-phosphorothioate
  modified_base 3: mod_base = OTHER; note = 2'-O-methylcytidine-3'-phosphate
  modified_base 4: mod_base = OTHER; note = 2'-O-methyluridine-3'-phosphate
  modified_base 5: mod_base = OTHER; note = 2'-O-methylguanosine-3'-phosphate
  modified_base 6: mod_base = OTHER; note = 2'-O-hexadecyl-guanosine-3'-phosphate
  modified_base 7: mod_base = OTHER; note = 2'-deoxy-2'-fluorocytidine-3'-phosphate
  modified_base 8: mod_base = OTHER; note = 2'-O-methyladenosine-3'-phosphate
  modified_base 9: mod_base = OTHER; note = 2'-deoxy-2'-fluoroguanosine-3'-phosphate
  modified_base 10: mod_base = OTHER; note = 2'-deoxy-2'-fluoroadenosine-3'-phosphate
  modified_base 11: mod_base = OTHER; note = 2'-deoxy-2'-fluoroguanosine-3'-phosphate
  modified_base 12: mod_base = OTHER; note = 2'-O-methylcytidine-3'-phosphate
  modified_base 13: mod_base = OTHER; note = 2'-O-methyluridine-3'-phosphate
  modified_base 14: mod_base = OTHER; note = 2'-O-methylcytidine-3'-phosphate
  modified_base 15: mod_base = OTHER; note = 2'-O-methylcytidine-3'-phosphate
  modified_base 16: mod_base = OTHER; note = 2'-O-methyluridine-3'-phosphate
  modified_base 17: mod_base = OTHER; note = 2'-O-methylcytidine-3'-phosphate
  modified_base 18: mod_base = OTHER; note = 2'-O-methyluridine-3'-phosphate
  modified_base 19: mod_base = OTHER; note = 2'-O-methyluridine-3'-phosphorothioate
  modified_base 20: mod_base = OTHER; note = 2'-O-methylguanosine-3'-phosphorothioate
  modified_base 21: mod_base = OTHER; note = 2'-O-methyladenosine
tactggcagagctcctcttga

SEQ ID NO: 569 - RNA, 21 nt, synthetic construct
  source 1..21: mol_type = other RNA
  modified_base 1: mod_base = OTHER; note = 2'-O-methylcytidine-3'-phosphorothioate
  modified_base 2: mod_base = OTHER; note = 2'-O-methyluridine-3'-phosphorothioate
  modified_base 3: mod_base = OTHER; note = 2'-O-methyluridine-3'-phosphate
  modified_base 4: mod_base = OTHER; note = 2'-O-methylguanosine-3'-phosphate
  modified_base 5: mod_base = OTHER; note = 2'-O-methylguanosine-3'-phosphate
  modified_base 6: mod_base = OTHER; note = 2'-O-hexadecyl-guanosine-3'-phosphate
  modified_base 7: mod_base = OTHER; note = 2'-deoxy-2'-fluorocytidine-3'-phosphate
  modified_base 8: mod_base = OTHER; note = 2'-O-methylcytidine-3'-phosphate
  modified_base 9: mod_base = OTHER; note = 2'-deoxy-2'-fluoroadenosine-3'-phosphate
  modified_base 10: mod_base = OTHER; note = 2'-deoxy-2'-fluoroguanosine-3'-phosphate
  modified_base 11: mod_base = OTHER; note = 2'-deoxy-2'-fluorocytidine-3'-phosphate
  modified_base 12: mod_base = OTHER; note = 2'-O-methylcytidine-3'-phosphate
  modified_base 13: mod_base = OTHER; note = 2'-O-methylcytidine-3'-phosphate
  modified_base 14: mod_base = OTHER; note = 2'-O-methyladenosine-3'-phosphate
  modified_base 15: mod_base = OTHER; note = 2'-O-methyluridine-3'-phosphate
  modified_base 16: mod_base = OTHER; note = 2'-O-methylcytidine-3'-phosphate
  modified_base 17: mod_base = OTHER; note = 2'-O-methyluridine-3'-phosphate
  modified_base 18: mod_base = OTHER; note = 2'-O-methyluridine-3'-phosphate
  modified_base 19: mod_base = OTHER; note = 2'-O-methylcytidine-3'-phosphorothioate
  modified_base 20: mod_base = OTHER; note = 2'-O-methylcytidine-3'-phosphorothioate
  modified_base 21: mod_base = OTHER; note = 2'-O-methyladenosine
cttgggccagcccatcttcca

SEQ ID NO: 570 - RNA, 21 nt, synthetic construct
  source 1..21: mol_type = other RNA
  modified_base 1: mod_base = OTHER; note = 2'-O-methylcytidine-3'-phosphorothioate
  modified_base 2: mod_base = OTHER; note = 2'-O-methyladenosine-3'-phosphorothioate
  modified_base 3: mod_base = OTHER; note = 2'-O-methylguanosine-3'-phosphate
  modified_base 4: mod_base = OTHER; note = 2'-O-methylcytidine-3'-phosphate
  modified_base 5: mod_base = OTHER; note = 2'-O-methyluridine-3'-phosphate
  modified_base 6: mod_base = OTHER; note = 2'-O-hexadecyl-guanosine-3'-phosphate
  modified_base 7: mod_base = OTHER; note = 2'-deoxy-2'-fluoroguanosine-3'-phosphate
  modified_base 8: mod_base = OTHER; note = 2'-O-methyluridine-3'-phosphate
  modified_base 9: mod_base = OTHER; note = 2'-deoxy-2'-fluoroguanosine-3'-phosphate
  modified_base 10: mod_base = OTHER; note = 2'-deoxy-2'-fluoroguanosine-3'-phosphate
  modified_base 11: mod_base = OTHER; note = 2'-deoxy-2'-fluoroadenosine-3'-phosphate
  modified_base 12: mod_base = OTHER; note = 2'-O-methylguanosine-3'-phosphate
  modified_base 13: mod_base = OTHER; note = 2'-O-methyladenosine-3'-phosphate
  modified_base 14: mod_base = OTHER; note = 2'-O-methyluridine-3'-phosphate
  modified_base 15: mod_base = OTHER; note = 2'-O-methylcytidine-3'-phosphate
  modified_base 16: mod_base = OTHER; note = 2'-O-methyladenosine-3'-phosphate
  modified_base 17: mod_base = OTHER; note = 2'-O-methyluridine-3'-phosphate
  modified_base 18: mod_base = OTHER; note = 2'-O-methylcytidine-3'-phosphate
  modified_base 19: mod_base = OTHER; note = 2'-O-methyladenosine-3'-phosphorothioate
  modified_base 20: mod_base = OTHER; note = 2'-O-methyladenosine-3'-phosphorothioate
  modified_base 21: mod_base = OTHER; note = 2'-O-methyladenosine
cagctggtggagatcatcaaa

SEQ ID NO: 571 - RNA, 21 nt, synthetic construct
  source 1..21: mol_type = other RNA
  modified_base 1: mod_base = OTHER; note = 2'-O-methylguanosine-3'-phosphorothioate
  modified_base 2: mod_base = OTHER; note = 2'-O-methyluridine-3'-phosphorothioate
  modified_base 3: mod_base = OTHER; note = 2'-O-methylguanosine-3'-phosphate
  modified_base 4: mod_base = OTHER; note = 2'-O-methylguanosine-3'-phosphate
  modified_base 5: mod_base = OTHER; note = 2'-O-methyladenosine-3'-phosphate
  modified_base 6: mod_base = OTHER; note = 2'-O-hexadecyl-guanosine-3'-phosphate
  modified_base 7: mod_base = OTHER; note = 2'-deoxy-2'-fluoroadenosine-3'-phosphate
  modified_base 8: mod_base = OTHER; note = 2'-O-methyluridine-3'-phosphate
  modified_base 9: mod_base = OTHER; note = 2'-deoxy-2'-fluorocytidine-3'-phosphate
  modified_base 10: mod_base = OTHER; note = 2'-deoxy-2'-fluoroadenosine-3'-phosphate
  modified_base 11: mod_base = OTHER; note = 2'-deoxy-2'-fluorouridine-3'-phosphate
  modified_base 12: mod_base = OTHER; note = 2'-O-methylcytidine-3'-phosphate
  modified_base 13: mod_base = OTHER; note = 2'-O-methyladenosine-3'-phosphate
  modified_base 14: mod_base = OTHER; note = 2'-O-methyladenosine-3'-phosphate
  modified_base 15: mod_base = OTHER; note = 2'-O-methylguanosine-3'-phosphate
  modified_base 16: mod_base = OTHER; note = 2'-O-methylguanosine-3'-phosphate
  modified_base 17: mod_base = OTHER; note = 2'-O-methyluridine-3'-phosphate
  modified_base 18: mod_base = OTHER; note = 2'-O-methylguanosine-3'-phosphate
  modified_base 19: mod_base = OTHER; note = 2'-O-methylcytidine-3'-phosphorothioate
  modified_base 20: mod_base = OTHER; note = 2'-O-methyluridine-3'-phosphorothioate
  modified_base 21: mod_base = OTHER; note = 2'-O-methyladenosine
gtggagatcatcaaggtgcta

SEQ ID NO: 572 - RNA, 21 nt, synthetic construct
  source 1..21: mol_type = other RNA
  modified_base 1: mod_base = OTHER; note = 2'-O-methyladenosine-3'-phosphorothioate
  modified_base 2: mod_base = OTHER; note = 2'-O-methyladenosine-3'-phosphorothioate
  modified_base 3: mod_base = OTHER; note = 2'-O-methylguanosine-3'-phosphate
  modified_base 4: mod_base = OTHER; note = 2'-O-methylguanosine-3'-phosphate
  modified_base 5: mod_base = OTHER; note = 2'-O-methyluridine-3'-phosphate
  modified_base 6: mod_base = OTHER; note = 2'-O-hexadecyl-guanosine-3'-phosphate
  modified_base 7: mod_base = OTHER; note = 2'-deoxy-2'-fluorocytidine-3'-phosphate
  modified_base 8: mod_base = OTHER; note = 2'-O-methyluridine-3'-phosphate
  modified_base 9: mod_base = OTHER; note = 2'-deoxy-2'-fluoroguanosine-3'-phosphate
  modified_base 10: mod_base = OTHER; note = 2'-deoxy-2'-fluoroguanosine-3'-phosphate
  modified_base 11: mod_base = OTHER; note = 2'-deoxy-2'-fluoroguanosine-3'-phosphate
  modified_base 12: mod_base = OTHER; note = 2'-O-methyladenosine-3'-phosphate
  modified_base 13: mod_base = OTHER; note = 2'-O-methyladenosine-3'-phosphate
  modified_base 14: mod_base = OTHER; note = 2'-O-methylcytidine-3'-phosphate
  modified_base 15: mod_base = OTHER; note = 2'-O-methyladenosine-3'-phosphate
  modified_base 16: mod_base = OTHER; note = 2'-O-methylcytidine-3'-phosphate
  modified_base 17: mod_base = OTHER; note = 2'-O-methylcytidine-3'-phosphate
  modified_base 18: mod_base = OTHER; note = 2'-O-methyladenosine-3'-phosphate
  modified_base 19: mod_base = OTHER; note = 2'-O-methyladenosine-3'-phosphorothioate
  modified_base 20: mod_base = OTHER; note = 2'-O-methylcytidine-3'-phosphorothioate
  modified_base 21: mod_base = OTHER; note = 2'-O-methyladenosine
aaggtgctgggaacaccaaca

SEQ ID NO: 573 - RNA, 21 nt, synthetic construct
  source 1..21: mol_type = other RNA
  modified_base 1: mod_base = OTHER; note = 2'-O-methyluridine-3'-phosphorothioate
  modified_base 2: mod_base = OTHER; note = 2'-O-methylguanosine-3'-phosphorothioate
  modified_base 3: mod_base = OTHER; note = 2'-O-methylguanosine-3'-phosphate
  modified_base 4: mod_base = OTHER; note = 2'-O-methylguanosine-3'-phosphate
  modified_base 5: mod_base = OTHER; note = 2'-O-methyladenosine-3'-phosphate
  modified_base 6: mod_base = OTHER; note = 2'-O-hexadecyl-adenosine-3'-phosphate
  modified_base 7: mod_base = OTHER; note = 2'-deoxy-2'-fluorocytidine-3'-phosphate
  modified_base 8: mod_base = OTHER; note = 2'-O-methyladenosine-3'-phosphate
  modified_base 9: mod_base = OTHER; note = 2'-deoxy-2'-fluorocytidine-3'-phosphate
  modified_base 10: mod_base = OTHER; note = 2'-deoxy-2'-fluorocytidine-3'-phosphate
  modified_base 11: mod_base = OTHER; note = 2'-deoxy-2'-fluoroadenosine-3'-phosphate
  modified_base 12: mod_base = OTHER; note = 2'-O-methyladenosine-3'-phosphate
  modified_base 13: mod_base = OTHER; note = 2'-O-methylcytidine-3'-phosphate
  modified_base 14: mod_base = OTHER; note = 2'-O-methylcytidine-3'-phosphate
  modified_base 15: mod_base = OTHER; note = 2'-O-methylcytidine-3'-phosphate
  modified_base 16: mod_base = OTHER; note = 2'-O-methylguanosine-3'-phosphate
  modified_base 17: mod_base = OTHER; note = 2'-O-methylguanosine-3'-phosphate
  modified_base 18: mod_base = OTHER; note = 2'-O-methylguanosine-3'-phosphate
  modified_base 19: mod_base = OTHER; note = 2'-O-methyladenosine-3'-phosphorothioate
  modified_base 20: mod_base = OTHER; note = 2'-O-methyladenosine-3'-phosphorothioate
  modified_base 21: mod_base = OTHER; note = 2'-O-methyladenosine
tgggaacaccaacccgggaaa

SEQ ID NO: 574 - RNA, 21 nt, synthetic construct
  source 1..21: mol_type = other RNA
  modified_base 1: mod_base = OTHER; note = 2'-O-methylcytidine-3'-phosphorothioate
  modified_base 2: mod_base = OTHER; note = 2'-O-methylcytidine-3'-phosphorothioate
  modified_base 3: mod_base = OTHER; note = 2'-O-methyladenosine-3'-phosphate
  modified_base 4: mod_base = OTHER; note = 2'-O-methyladenosine-3'-phosphate
  modified_base 5: mod_base = OTHER; note = 2'-O-methylcytidine-3'-phosphate
  modified_base 6: mod_base = OTHER; note = 2'-O-hexadecyl-cytidine-3'-phosphate
  modified_base 7: mod_base = OTHER; note = 2'-deoxy-2'-fluorocytidine-3'-phosphate
  modified_base 8: mod_base = OTHER; note = 2'-O-methylguanosine-3'-phosphate
  modified_base 9: mod_base = OTHER; note = 2'-deoxy-2'-fluoroguanosine-3'-phosphate
  modified_base 10: mod_base = OTHER; note = 2'-deoxy-2'-fluoroguanosine-3'-phosphate
  modified_base 11: mod_base = OTHER; note = 2'-deoxy-2'-fluoroadenosine-3'-phosphate
  modified_base 12: mod_base = OTHER; note = 2'-O-methyladenosine-3'-phosphate
  modified_base 13: mod_base = OTHER; note = 2'-O-methylcytidine-3'-phosphate
  modified_base 14: mod_base = OTHER; note = 2'-O-methyladenosine-3'-phosphate
  modified_base 15: mod_base = OTHER; note = 2'-O-methyladenosine-3'-phosphate
  modified_base 16: mod_base = OTHER; note = 2'-O-methyladenosine-3'-phosphate
  modified_base 17: mod_base = OTHER; note = 2'-O-methyluridine-3'-phosphate
  modified_base 18: mod_base = OTHER; note = 2'-O-methylcytidine-3'-phosphate
  modified_base 19: mod_base = OTHER; note = 2'-O-methylcytidine-3'-phosphorothioate
  modified_base 20: mod_base = OTHER; note = 2'-O-methylguanosine-3'-phosphorothioate
  modified_base 21: mod_base = OTHER; note = 2'-O-methyladenosine
ccaacccgggaacaaatccga

SEQ ID NO: 575 - RNA, 21 nt, synthetic construct
  source 1..21: mol_type = other RNA
  modified_base 1: mod_base = OTHER; note = 2'-O-methylcytidine-3'-phosphorothioate
  modified_base 2: mod_base = OTHER; note = 2'-O-methylguanosine-3'-phosphorothioate
  modified_base 3: mod_base = OTHER; note = 2'-O-methylguanosine-3'-phosphate
  modified_base 4: mod_base = OTHER; note = 2'-O-methylguanosine-3'-phosphate
  modified_base 5: mod_base = OTHER; note = 2'-O-methyladenosine-3'-phosphate
  modified_base 6: mod_base = OTHER; note = 2'-O-hexadecyl-adenosine-3'-phosphate
  modified_base 7: mod_base = OTHER; note = 2'-deoxy-2'-fluorocytidine-3'-phosphate
  modified_base 8: mod_base = OTHER; note = 2'-O-methyladenosine-3'-phosphate
  modified_base 9: mod_base = OTHER; note = 2'-deoxy-2'-fluoroadenosine-3'-phosphate
  modified_base 10: mod_base = OTHER; note = 2'-deoxy-2'-fluoroadenosine-3'-phosphate
  modified_base 11: mod_base = OTHER; note = 2'-deoxy-2'-fluorouridine-3'-phosphate
  modified_base 12: mod_base = OTHER; note = 2'-O-methylcytidine-3'-phosphate
  modified_base 13: mod_base = OTHER; note = 2'-O-methylcytidine-3'-phosphate
  modified_base 14: mod_base = OTHER; note = 2'-O-methylguanosine-3'-phosphate
  modified_base 15: mod_base = OTHER; note = 2'-O-methyladenosine-3'-phosphate
  modified_base 16: mod_base = OTHER; note = 2'-O-methylguanosine-3'-phosphate
  modified_base 17: mod_base = OTHER; note = 2'-O-methyladenosine-3'-phosphate
  modified_base 18: mod_base = OTHER; note = 2'-O-methylguanosine-3'-phosphate
  modified_base 19: mod_base = OTHER; note = 2'-O-methyladenosine-3'-phosphorothioate
  modified_base 20: mod_base = OTHER; note = 2'-O-methyluridine-3'-phosphorothioate
  modified_base 21: mod_base = OTHER; note = 2'-O-methyladenosine
cgggaacaaatccgagagata

SEQ ID NO: 576 - RNA, 21 nt, synthetic construct
  source 1..21: mol_type = other RNA
  modified_base 1: mod_base = OTHER; note = 2'-O-methyladenosine-3'-phosphorothioate
  modified_base 2: mod_base = OTHER; note = 2'-O-methylcytidine-3'-phosphorothioate
  modified_base 3: mod_base = OTHER; note = 2'-O-methyladenosine-3'-phosphate
  modified_base 4: mod_base = OTHER; note = 2'-O-methylcytidine-3'-phosphate
  modified_base 5: mod_base = OTHER; note = 2'-O-methylguanosine-3'-phosphate
  modified_base 6: mod_base = OTHER; note = 2'-O-hexadecyl-guanosine-3'-phosphate
  modified_base 7: mod_base = OTHER; note = 2'-deoxy-2'-fluoroadenosine-3'-phosphate
  modified_base 8: mod_base = OTHER; note = 2'-O-methylguanosine-3'-phosphate
  modified_base 9: mod_base = OTHER; note = 2'-deoxy-2'-fluorouridine-3'-phosphate
  modified_base 10: mod_base = OTHER; note = 2'-deoxy-2'-fluorouridine-3'-phosphate
  modified_base 11: mod_base = OTHER; note = 2'-deoxy-2'-fluorocytidine-3'-phosphate
  modified_base 12: mod_base = OTHER; note = 2'-O-methyladenosine-3'-phosphate
  modified_base 13: mod_base = OTHER; note = 2'-O-methyladenosine-3'-phosphate
  modified_base 14: mod_base = OTHER; note = 2'-O-methylguanosine-3'-phosphate
  modified_base 15: mod_base = OTHER; note = 2'-O-methyluridine-3'-phosphate
  modified_base 16: mod_base = OTHER; note = 2'-O-methyluridine-3'-phosphate
  modified_base 17: mod_base = OTHER; note = 2'-O-methylcytidine-3'-phosphate
  modified_base 18: mod_base = OTHER; note = 2'-O-methylcytidine-3'-phosphate
  modified_base 19: mod_base = OTHER; note = 2'-O-methylcytidine-3'-phosphorothioate
  modified_base 20: mod_base = OTHER; note = 2'-O-methyluridine-3'-phosphorothioate
  modified_base 21: mod_base = OTHER; note = 2'-O-methyladenosine
acacggagttcaagttcccta

SEQ ID NO: 577 - RNA, 21 nt, synthetic construct
  source 1..21: mol_type = other RNA
  modified_base 1: mod_base = OTHER; note = 2'-O-methylguanosine-3'-phosphorothioate
  modified_base 2: mod_base = OTHER; note = 2'-O-methyluridine-3'-phosphorothioate
  modified_base 3: mod_base = OTHER; note = 2'-O-methyluridine-3'-phosphate
  modified_base 4: mod_base = OTHER; note = 2'-O-methylcytidine-3'-phosphate
  modified_base 5: mod_base = OTHER; note = 2'-O-methyladenosine-3'-phosphate
  modified_base 6: mod_base = OTHER; note = 2'-O-hexadecyl-adenosine-3'-phosphate
  modified_base 7: mod_base = OTHER; note = 2'-deoxy-2'-fluoroguanosine-3'-phosphate
  modified_base 8: mod_base = OTHER; note = 2'-O-methyluridine-3'-phosphate
  modified_base 9: mod_base = OTHER; note = 2'-deoxy-2'-fluorouridine-3'-phosphate
  modified_base 10: mod_base = OTHER; note = 2'-deoxy-2'-fluorocytidine-3'-phosphate
  modified_base 11: mod_base = OTHER; note = 2'-deoxy-2'-fluorocytidine-3'-phosphate
  modified_base 12: mod_base = OTHER; note = 2'-O-methylcytidine-3'-phosphate
  modified_base 13: mod_base = OTHER; note = 2'-O-methyluridine-3'-phosphate
  modified_base 14: mod_base = OTHER; note = 2'-O-methylcytidine-3'-phosphate
  modified_base 15: mod_base = OTHER; note = 2'-O-methyladenosine-3'-phosphate
  modified_base 16: mod_base = OTHER; note = 2'-O-methylguanosine-3'-phosphate
  modified_base 17: mod_base = OTHER; note = 2'-O-methyladenosine-3'-phosphate
  modified_base 18: mod_base = OTHER; note = 2'-O-methyluridine-3'-phosphate
  modified_base 19: mod_base = OTHER; note = 2'-O-methyluridine-3'-phosphorothioate
  modified_base 20: mod_base = OTHER; note = 2'-O-methyladenosine-3'-phosphorothioate
  modified_base 21: mod_base = OTHER; note = 2'-O-methyladenosine
gttcaagttccctcagattaa

SEQ ID NO: 578 - RNA, 21 nt, synthetic construct
  source 1..21: mol_type = other RNA
  modified_base 1: mod_base = OTHER; note = 2'-O-methylguanosine-3'-phosphorothioate
  modified_base 2: mod_base = OTHER; note = 2'-O-methyluridine-3'-phosphorothioate
  modified_base 3: mod_base = OTHER; note = 2'-O-methyluridine-3'-phosphate
  modified_base 4: mod_base = OTHER; note = 2'-O-methylcytidine-3'-phosphate
  modified_base 5: mod_base = OTHER; note = 2'-O-methylcytidine-3'-phosphate
  modified_base 6: mod_base = OTHER; note = 2'-O-hexadecyl-cytidine-3'-phosphate
  modified_base 7: mod_base = OTHER; note = 2'-deoxy-2'-fluorouridine-3'-phosphate
  modified_base 8: mod_base = OTHER; note = 2'-O-methylcytidine-3'-phosphate
  modified_base 9: mod_base = OTHER; note = 2'-deoxy-2'-fluoroadenosine-3'-phosphate
  modified_base 10: mod_base = OTHER; note = 2'-deoxy-2'-fluoroguanosine-3'-phosphate
  modified_base 11: mod_base = OTHER; note = 2'-deoxy-2'-fluoroadenosine-3'-phosphate
  modified_base 12: mod_base = OTHER; note = 2'-O-methyluridine-3'-phosphate
  modified_base 13: mod_base = OTHER; note = 2'-O-methyluridine-3'-phosphate
  modified_base 14: mod_base = OTHER; note = 2'-O-methyladenosine-3'-phosphate
  modified_base 15: mod_base = OTHER; note = 2'-O-methyladenosine-3'-phosphate
  modified_base 16: mod_base = OTHER; note = 2'-O-methyladenosine-3'-phosphate
  modified_base 17: mod_base = OTHER; note = 2'-O-methylguanosine-3'-phosphate
  modified_base 18: mod_base = OTHER; note = 2'-O-methylcytidine-3'-phosphate
  modified_base 19: mod_base = OTHER; note = 2'-O-methyluridine-3'-phosphorothioate
  modified_base 20: mod_base = OTHER; note = 2'-O-methylcytidine-3'-phosphorothioate
  modified_base 21: mod_base = OTHER; note = 2'-O-methyladenosine
gttccctcagattaaagctca

SEQ ID NO: 579 - RNA, 21 nt, synthetic construct
  source 1..21: mol_type = other RNA
  modified_base 1: mod_base = OTHER; note = 2'-O-methylcytidine-3'-phosphorothioate
  modified_base 2: mod_base = OTHER; note = 2'-O-methyluridine-3'-phosphorothioate
  modified_base 3: mod_base = OTHER; note = 2'-O-methylguanosine-3'-phosphate
  modified_base 4: mod_base = OTHER; note = 2'-O-methylguanosine-3'-phosphate
  modified_base 5: mod_base = OTHER; note = 2'-O-methyladenosine-3'-phosphate
  modified_base 6: mod_base = OTHER; note = 2'-O-hexadecyl-cytidine-3'-phosphate
  modified_base 7: mod_base = OTHER; note = 2'-deoxy-2'-fluoroadenosine-3'-phosphate
  modified_base 8: mod_base = OTHER; note = 2'-O-methyladenosine-3'-phosphate
  modified_base 9: mod_base = OTHER; note = 2'-deoxy-2'-fluoroadenosine-3'-phosphate
  modified_base 10: mod_base = OTHER; note = 2'-deoxy-2'-fluoroguanosine-3'-phosphate
  modified_base 11: mod_base = OTHER; note = 2'-deoxy-2'-fluoroguanosine-3'-phosphate
  modified_base 12: mod_base = OTHER; note = 2'-O-methyluridine-3'-phosphate
  modified_base 13: mod_base = OTHER; note = 2'-O-methylguanosine-3'-phosphate
  modified_base 14: mod_base = OTHER; note = 2'-O-methyluridine-3'-phosphate
  modified_base 15: mod_base = OTHER; note = 2'-O-methyluridine-3'-phosphate
  modified_base 16: mod_base = OTHER; note = 2'-O-methylcytidine-3'-phosphate
  modified_base 17: mod_base = OTHER; note = 2'-O-methyladenosine-3'-phosphate
  modified_base 18: mod_base = OTHER; note = 2'-O-methyladenosine-3'-phosphate
  modified_base 19: mod_base = OTHER; note = 2'-O-methyladenosine-3'-phosphorothioate
  modified_base 20: mod_base = OTHER; note = 2'-O-methyluridine-3'-phosphorothioate
  modified_base 21: mod_base = OTHER; note = 2'-O-methyladenosine
ctggacaaaggtgttcaaata

SEQ ID NO: 580 - RNA, 21 nt, synthetic construct
  source 1..21: mol_type = other RNA
  modified_base 1: mod_base = OTHER; note = 2'-O-methyladenosine-3'-phosphorothioate
  modified_base 2: mod_base = OTHER; note = 2'-O-methyladenosine-3'-phosphorothioate
  modified_base 3: mod_base = OTHER; note = 2'-O-methyladenosine-3'-phosphate
  modified_base 4: mod_base = OTHER; note = 2'-O-methylguanosine-3'-phosphate
  modified_base 5: mod_base = OTHER; note = 2'-O-methylguanosine-3'-phosphate
  modified_base 6: mod_base = OTHER; note = 2'-O-hexadecyl-uridine-3'-phosphate
  modified_base 7: mod_base = OTHER; note = 2'-deoxy-2'-fluoroguanosine-3'-phosphate
  modified_base 8: mod_base = OTHER; note = 2'-O-methyluridine-3'-phosphate
  modified_base 9: mod_base = OTHER; note = 2'-deoxy-2'-fluorouridine-3'-phosphate
  modified_base 10: mod_base = OTHER; note = 2'-deoxy-2'-fluorocytidine-3'-phosphate
  modified_base 11: mod_base = OTHER; note = 2'-deoxy-2'-fluoroadenosine-3'-phosphate
  modified_base 12: mod_base = OTHER; note = 2'-O-methyladenosine-3'-phosphate
  modified_base 13: mod_base = OTHER; note = 2'-O-methyladenosine-3'-phosphate
  modified_base 14: mod_base = OTHER; note = 2'-O-methyluridine-3'-phosphate
  modified_base 15: mod_base = OTHER; note = 2'-O-methylcytidine-3'-phosphate
  modified_base 16: mod_base = OTHER; note = 2'-O-methyluridine-3'-phosphate
  modified_base 17: mod_base = OTHER; note = 2'-O-methylcytidine-3'-phosphate
  modified_base 18: mod_base = OTHER; note = 2'-O-methylguanosine-3'-phosphate
  modified_base 19: mod_base = OTHER; note = 2'-O-methyladenosine-3'-phosphorothioate
  modified_base 20: mod_base = OTHER; note = 2'-O-methyladenosine-3'-phosphorothioate
  modified_base 21: mod_base = OTHER; note = 2'-O-methyladenosine
aaaggtgttcaaatctcgaaa

SEQ ID NO: 581 - RNA, 21 nt, synthetic construct
  source 1..21: mol_type = other RNA
  modified_base 1: mod_base = OTHER; note = 2'-O-methylguanosine-3'-phosphorothioate
  modified_base 2: mod_base = OTHER; note = 2'-O-methyluridine-3'-phosphorothioate
  modified_base 3: mod_base = OTHER; note = 2'-O-methyluridine-3'-phosphate
  modified_base 4: mod_base = OTHER; note = 2'-O-methylcytidine-3'-phosphate
  modified_base 5: mod_base = OTHER; note = 2'-O-methyladenosine-3'-phosphate
  modified_base 6: mod_base = OTHER; note = 2'-O-hexadecyl-adenosine-3'-phosphate
  modified_base 7: mod_base = OTHER; note = 2'-deoxy-2'-fluoroadenosine-3'-phosphate
  modified_base 8: mod_base = OTHER; note = 2'-O-methyluridine-3'-phosphate
  modified_base 9: mod_base = OTHER; note = 2'-deoxy-2'-fluorocytidine-3'-phosphate
  modified_base 10: mod_base = OTHER; note = 2'-deoxy-2'-fluorouridine-3'-phosphate
  modified_base 11: mod_base = OTHER; note = 2'-deoxy-2'-fluorocytidine-3'-phosphate
  modified_base 12: mod_base = OTHER; note = 2'-O-methylguanosine-3'-phosphate
  modified_base 13: mod_base = OTHER; note = 2'-O-methyladenosine-3'-phosphate
  modified_base 14: mod_base = OTHER; note = 2'-O-methyladenosine-3'-phosphate
  modified_base 15: mod_base = OTHER; note = 2'-O-methylcytidine-3'-phosphate
  modified_base 16: mod_base = OTHER; note = 2'-O-methylguanosine-3'-phosphate
  modified_base 17: mod_base = OTHER; note = 2'-O-methylcytidine-3'-phosphate
  modified_base 18: mod_base = OTHER; note = 2'-O-methylcytidine-3'-phosphate
  modified_base 19: mod_base = OTHER; note = 2'-O-methylguanosine-3'-phosphorothioate
  modified_base 20: mod_base = OTHER; note = 2'-O-methylcytidine-3'-phosphorothioate
  modified_base 21: mod_base = OTHER; note = 2'-O-methyladenosine
gttcaaatctcgaacgccgca

SEQ ID NO: 582 - RNA, 21 nt, synthetic construct
  source 1..21: mol_type = other RNA
  modified_base 1: mod_base = OTHER; note = 2'-O-methyladenosine-3'-phosphorothioate
  modified_base 2: mod_base = OTHER; note = 2'-O-methylguanosine-3'-phosphorothioate
  modified_base 3: mod_base = OTHER; note = 2'-O-methylguanosine-3'-phosphate
  modified_base 4: mod_base = OTHER; note = 2'-O-methylcytidine-3'-phosphate
  modified_base 5: mod_base = OTHER; note = 2'-O-methylcytidine-3'-phosphate
  modified_base 6: mod_base = OTHER; note = 2'-O-hexadecyl-adenosine-3'-phosphate
  modified_base 7: mod_base = OTHER; note = 2'-deoxy-2'-fluorouridine-3'-phosphate
  modified_base 8: mod_base = OTHER; note = 2'-O-methylcytidine-3'-phosphate
  modified_base 9: mod_base = OTHER; note = 2'-deoxy-2'-fluoroguanosine-3'-phosphate
  modified_base 10: mod_base = OTHER; note = 2'-deoxy-2'-fluorocytidine-3'-phosphate
  modified_base 11: mod_base = OTHER; note = 2'-deoxy-2'-fluoroguanosine-3'-phosphate
  modified_base 12: mod_base = OTHER; note = 2'-O-methylcytidine-3'-phosphate
  modified_base 13: mod_base = OTHER; note = 2'-O-methyluridine-3'-phosphate
  modified_base 14: mod_base = OTHER; note = 2'-O-methylcytidine-3'-phosphate
  modified_base 15: mod_base = OTHER; note = 2'-O-methyluridine-3'-phosphate
  modified_base 16: mod_base = OTHER; note = 2'-O-methylguanosine-3'-phosphate
  modified_base 17: mod_base = OTHER; note = 2'-O-methylcytidine-3'-phosphate
  modified_base 18: mod_base = OTHER; note = 2'-O-methyluridine-3'-phosphate
  modified_base 19: mod_base = OTHER; note = 2'-O-methylcytidine-3'-phosphorothioate
  modified_base 20: mod_base = OTHER; note = 2'-O-methyluridine-3'-phosphorothioate
  modified_base 21: mod_base = OTHER; note = 2'-O-methyladenosine
aggccatcgcgctctgctcta

SEQ ID NO: 583 - RNA, 21 nt, synthetic construct
  source 1..21: mol_type = other RNA
  modified_base 1: mod_base = OTHER; note = 2'-O-methyluridine-3'-phosphorothioate
  modified_base 2: mod_base = OTHER; note = 2'-O-methylcytidine-3'-phosphorothioate
  modified_base 3: mod_base = OTHER; note = 2'-O-methylguanosine-3'-phosphate
  modified_base 4: mod_base = OTHER; note = 2'-O-methylcytidine-3'-phosphate
  modified_base 5: mod_base = OTHER; note = 2'-O-methylguanosine-3'-phosphate
  modified_base 6: mod_base = OTHER; note = 2'-O-hexadecyl-cytidine-3'-phosphate
  modified_base 7: mod_base = OTHER; note = 2'-deoxy-2'-fluorouridine-3'-phosphate
  modified_base 8: mod_base = OTHER; note = 2'-O-methylcytidine-3'-phosphate
  modified_base 9: mod_base = OTHER; note = 2'-deoxy-2'-fluorouridine-3'-phosphate
  modified_base 10: mod_base = OTHER; note = 2'-deoxy-2'-fluoroguanosine-3'-phosphate
  modified_base 11: mod_base = OTHER; note = 2'-deoxy-2'-fluorocytidine-3'-phosphate
  modified_base 12: mod_base = OTHER; note = 2'-O-methyluridine-3'-phosphate
  modified_base 13: mod_base = OTHER; note = 2'-O-methylcytidine-3'-phosphate
  modified_base 14: mod_base = OTHER; note = 2'-O-methyluridine-3'-phosphate
  modified_base 15: mod_base = OTHER; note = 2'-O-methyladenosine-3'-phosphate
  modified_base 16: mod_base = OTHER; note = 2'-O-methylguanosine-3'-phosphate
  modified_base 17: mod_base = OTHER; note = 2'-O-methylcytidine-3'-phosphate
  modified_base 18: mod_base = OTHER; note = 2'-O-methylcytidine-3'-phosphate
  modified_base 19: mod_base = OTHER; note = 2'-O-methyluridine-3'-phosphorothioate
  modified_base 20: mod_base = OTHER; note = 2'-O-methylguanosine-3'-phosphorothioate
  modified_base 21: mod_base = OTHER; note = 2'-O-methyladenosine
tcgcgctctgctctagcctga

SEQ ID NO: 584 - RNA, 21 nt, synthetic construct
  source 1..21: mol_type = other RNA
  modified_base 1: mod_base = OTHER; note = 2'-O-methyluridine-3'-phosphorothioate
  modified_base 2: mod_base = OTHER; note = 2'-O-methylcytidine-3'-phosphorothioate
  modified_base 3: mod_base = OTHER; note = 2'-O-methyluridine-3'-phosphate
  modified_base 4: mod_base = OTHER; note = 2'-O-methyladenosine-3'-phosphate
  modified_base 5: mod_base = OTHER; note = 2'-O-methylguanosine-3'-phosphate
  modified_base 6: mod_base = OTHER; note = 2'-O-hexadecyl-cytidine-3'-phosphate
  modified_base 7: mod_base = OTHER; note = 2'-deoxy-2'-fluorocytidine-3'-phosphate
  modified_base 8: mod_base = OTHER; note = 2'-O-methyluridine-3'-phosphate
  modified_base 9: mod_base = OTHER; note = 2'-deoxy-2'-fluoroguanosine-3'-phosphate
  modified_base 10: mod_base = OTHER; note = 2'-deoxy-2'-fluorocytidine-3'-phosphate
  modified_base 11: mod_base = OTHER; note = 2'-deoxy-2'-fluorouridine-3'-phosphate
  modified_base 12: mod_base = OTHER; note = 2'-O-methylguanosine-3'-phosphate
  modified_base 13: mod_base = OTHER; note = 2'-O-methylguanosine-3'-phosphate
  modified_base 14: mod_base = OTHER; note = 2'-O-methyladenosine-3'-phosphate
  modified_base 15: mod_base = OTHER; note = 2'-O-methylguanosine-3'-phosphate
  modified_base 16: mod_base = OTHER; note = 2'-O-methyluridine-3'-phosphate
  modified_base 17: mod_base = OTHER; note = 2'-O-methyladenosine-3'-phosphate
  modified_base 18: mod_base = OTHER; note = 2'-O-methylcytidine-3'-phosphate
  modified_base 19: mod_base = OTHER; note = 2'-O-methyladenosine-3'-phosphorothioate
  modified_base 20: mod_base = OTHER; note = 2'-O-methylcytidine-3'-phosphorothioate
  modified_base 21: mod_base = OTHER; note = 2'-O-methyladenosine
tctagcctgctggagtacaca

SEQ ID NO: 585 - RNA, 21 nt, synthetic construct
  source 1..21: mol_type = other RNA
  modified_base 1: mod_base = OTHER; note = 2'-O-methylguanosine-3'-phosphorothioate
  modified_base 2: mod_base = OTHER; note = 2'-O-methyluridine-3'-phosphorothioate
  modified_base 3: mod_base = OTHER; note = 2'-O-methylguanosine-3'-phosphate
  modified_base 4: mod_base = OTHER; note = 2'-O-methylcytidine-3'-phosphate
  modified_base 5: mod_base = OTHER; note = 2'-O-methylguanosine-3'-phosphate
  modified_base 6: mod_base = OTHER; note = 2'-O-hexadecyl-cytidine-3'-phosphate
  modified_base 7: mod_base = OTHER; note = 2'-deoxy-2'-fluoroadenosine-3'-phosphate
  modified_base 8: mod_base = OTHER; note = 2'-O-methylcytidine-3'-phosphate
  modified_base 9: mod_base = OTHER; note = 2'-deoxy-2'-fluoroadenosine-3'-phosphate
  modified_base 10: mod_base = OTHER; note = 2'-deoxy-2'-fluoroguanosine-3'-phosphate
  modified_base 11: mod_base = OTHER; note = 2'-deoxy-2'-fluorocytidine-3'-phosphate
  modified_base 12: mod_base = OTHER; note = 2'-O-methyluridine-3'-phosphate
  modified_base 13: mod_base = OTHER; note = 2'-O-methyluridine-3'-phosphate
  modified_base 14: mod_base = OTHER; note = 2'-O-methylcytidine-3'-phosphate
  modified_base 15: mod_base = OTHER; note = 2'-O-methyluridine-3'-phosphate
  modified_base 16: mod_base = OTHER; note = 2'-O-methyluridine-3'-phosphate
  modified_base 17: mod_base = OTHER; note = 2'-O-methyluridine-3'-phosphate
  modified_base 18: mod_base = OTHER; note = 2'-O-methylguanosine-3'-phosphate
  modified_base 19: mod_base = OTHER; note = 2'-O-methyladenosine-3'-phosphorothioate
  modified_base 20: mod_base = OTHER; note = 2'-O-methyluridine-3'-phosphorothioate
  modified_base 21: mod_base = OTHER; note = 2'-O-methyladenosine
gtgcgcacagcttctttgata

SEQ ID NO: 586 - RNA, 21 nt, synthetic construct
  source 1..21: mol_type = other RNA
  modified_base 1: mod_base = OTHER; note = 2'-O-methyladenosine-3'-phosphorothioate
  modified_base 2: mod_base = OTHER; note = 2'-O-methylcytidine-3'-phosphorothioate
  modified_base 3: mod_base = OTHER; note = 2'-O-methyladenosine-3'-phosphate
  modified_base 4: mod_base = OTHER; note = 2'-O-methylguanosine-3'-phosphate
  modified_base 5: mod_base = OTHER; note = 2'-O-methylcytidine-3'-phosphate
  modified_base 6: mod_base = OTHER; note = 2'-O-hexadecyl-uridine-3'-phosphate
  modified_base 7: mod_base = OTHER; note = 2'-deoxy-2'-fluorouridine-3'-phosphate
  modified_base 8: mod_base = OTHER; note = 2'-O-methylcytidine-3'-phosphate
  modified_base 9: mod_base = OTHER; note = 2'-deoxy-2'-fluorouridine-3'-phosphate
  modified_base 10: mod_base = OTHER; note = 2'-deoxy-2'-fluorouridine-3'-phosphate
  modified_base 11: mod_base = OTHER; note = 2'-deoxy-2'-fluorouridine-3'-phosphate
  modified_base 12: mod_base = OTHER; note = 2'-O-methylguanosine-3'-phosphate
  modified_base 13: mod_base = OTHER; note = 2'-O-methyladenosine-3'-phosphate
  modified_base 14: mod_base = OTHER; note = 2'-O-methyluridine-3'-phosphate
  modified_base 15: mod_base = OTHER; note = 2'-O-methylguanosine-3'-phosphate
  modified_base 16: mod_base = OTHER; note = 2'-O-methyladenosine-3'-phosphate
  modified_base 17: mod_base = OTHER; note = 2'-O-methyladenosine-3'-phosphate
  modified_base 18: mod_base = OTHER; note = 2'-O-methylcytidine-3'-phosphate
  modified_base 19: mod_base = OTHER; note = 2'-O-methyluridine-3'-phosphorothioate
  modified_base 20: mod_base = OTHER; note = 2'-O-methylguanosine-3'-phosphorothioate
  modified_base 21: mod_base = OTHER; note = 2'-O-methyladenosine
acagcttctttgatgaactga

SEQ ID NO: 587 - RNA, 21 nt, synthetic construct
  source 1..21: mol_type = other RNA
  modified_base 1: mod_base = OTHER; note = 2'-O-methyluridine-3'-phosphorothioate
  modified_base 2: mod_base = OTHER; note = 2'-O-methyluridine-3'-phosphorothioate
  modified_base 3: mod_base = OTHER; note = 2'-O-methyluridine-3'-phosphate
  modified_base 4: mod_base = OTHER; note = 2'-O-methylguanosine-3'-phosphate
  modified_base 5: mod_base = OTHER; note = 2'-O-methyladenosine-3'-phosphate
  modified_base 6: mod_base = OTHER; note = 2'-O-hexadecyl-uridine-3'-phosphate
  modified_base 7: mod_base = OTHER; note = 2'-deoxy-2'-fluoroguanosine-3'-phosphate
  modified_base 8: mod_base = OTHER; note = 2'-O-methyladenosine-3'-phosphate
  modified_base 9: mod_base = OTHER; note = 2'-deoxy-2'-fluoroadenosine-3'-phosphate
  modified_base 10: mod_base = OTHER; note = 2'-deoxy-2'-fluorocytidine-3'-phosphate
  modified_base 11: mod_base = OTHER; note = 2'-deoxy-2'-fluorouridine-3'-phosphate
  modified_base 12: mod_base = OTHER; note = 2'-O-methylguanosine-3'-phosphate
  modified_base 13: mod_base = OTHER; note = 2'-O-methylcytidine-3'-phosphate
  modified_base 14: mod_base = OTHER; note = 2'-O-methylguanosine-3'-phosphate
  modified_base 15: mod_base = OTHER; note = 2'-O-methyladenosine-3'-phosphate
  modified_base 16: mod_base = OTHER; note = 2'-O-methyluridine-3'-phosphate
  modified_base 17: mod_base = OTHER; note = 2'-O-methylguanosine-3'-phosphate
  modified_base 18: mod_base = OTHER; note = 2'-O-methyluridine-3'-phosphate
  modified_base 19: mod_base = OTHER; note = 2'-O-methylcytidine-3'-phosphorothioate
  modified_base 20: mod_base = OTHER; note = 2'-O-methyluridine-3'-phosphorothioate
  modified_base 21: mod_base = OTHER; note = 2'-O-methyladenosine
tttgatgaactgcgatgtcta

SEQ ID NO: 588 - RNA, 21 nt, synthetic construct
  source 1..21: mol_type = other RNA
  modified_base 1: mod_base = OTHER; note = 2'-O-methylguanosine-3'-phosphorothioate
  modified_base 2: mod_base = OTHER; note = 2'-O-methyladenosine-3'-phosphorothioate
  modified_base 3: mod_base = OTHER; note = 2'-O-methyladenosine-3'-phosphate
  modified_base 4: mod_base = OTHER; note = 2'-O-methylcytidine-3'-phosphate
  modified_base 5: mod_base = OTHER; note = 2'-O-methyluridine-3'-phosphate
  modified_base 6: mod_base = OTHER; note = 2'-O-hexadecyl-guanosine-3'-phosphate
  modified_base 7: mod_base = OTHER; note = 2'-deoxy-2'-fluorocytidine-3'-phosphate
  modified_base 8: mod_base = OTHER; note = 2'-O-methylguanosine-3'-phosphate
  modified_base 9: mod_base = OTHER; note = 2'-deoxy-2'-fluoroadenosine-3'-phosphate
  modified_base 10: mod_base = OTHER; note = 2'-deoxy-2'-fluorouridine-3'-phosphate
  modified_base 11: mod_base = OTHER; note = 2'-deoxy-2'-fluoroguanosine-3'-phosphate
  modified_base 12: mod_base = OTHER; note = 2'-O-methyluridine-3'-phosphate
  modified_base 13: mod_base = OTHER; note = 2'-O-methylcytidine-3'-phosphate
  modified_base 14: mod_base = OTHER; note = 2'-O-methyluridine-3'-phosphate
  modified_base 15: mod_base = OTHER; note = 2'-O-methylguanosine-3'-phosphate
  modified_base 16: mod_base = OTHER; note = 2'-O-methylguanosine-3'-phosphate
  modified_base 17: mod_base = OTHER; note = 2'-O-methylguanosine-3'-phosphate
  modified_base 18: mod_base = OTHER; note = 2'-O-methyladenosine-3'-phosphate
  modified_base 19: mod_base = OTHER; note = 2'-O-methyladenosine-3'-phosphorothioate
  modified_base 20: mod_base = OTHER; note = 2'-O-methylcytidine-3'-phosphorothioate
  modified_base 21: mod_base = OTHER; note = 2'-O-methyladenosine
gaactgcgatgtctgggaaca

SEQ ID NO: 589 - RNA, 21 nt, synthetic construct
  source 1..21: mol_type = other RNA
  modified_base 1: mod_base = OTHER; note = 2'-O-methylcytidine-3'-phosphorothioate
  modified_base 2: mod_base = OTHER; note = 2'-O-methylguanosine-3'-phosphorothioate
  modified_base 3: mod_base = OTHER; note = 2'-O-methyladenosine-3'-phosphate
  modified_base 4: mod_base = OTHER; note = 2'-O-methyluridine-3'-phosphate
  modified_base 5: mod_base = OTHER; note = 2'-O-methylguanosine-3'-phosphate
  modified_base 6: mod_base = OTHER; note = 2'-O-hexadecyl-uridine-3'-phosphate
  modified_base 7: mod_base = OTHER; note = 2'-deoxy-2'-fluorocytidine-3'-phosphate
  modified_base 8: mod_base = OTHER; note = 2'-O-methyluridine-3'-phosphate
  modified_base 9: mod_base = OTHER; note = 2'-deoxy-2'-fluoroguanosine-3'-phosphate
  modified_base 10: mod_base = OTHER; note = 2'-deoxy-2'-fluoroguanosine-3'-phosphate
  modified_base 11: mod_base = OTHER; note = 2'-deoxy-2'-fluoroguanosine-3'-phosphate
  modified_base 12: mod_base = OTHER; note = 2'-O-methyladenosine-3'-phosphate
  modified_base 13: mod_base = OTHER; note = 2'-O-methyladenosine-3'-phosphate
  modified_base 14: mod_base = OTHER; note = 2'-O-methylcytidine-3'-phosphate
  modified_base 15: mod_base = OTHER; note = 2'-O-methylcytidine-3'-phosphate
  modified_base 16: mod_base = OTHER; note = 2'-O-methylcytidine-3'-phosphate
  modified_base 17: mod_base = OTHER; note = 2'-O-methyladenosine-3'-phosphate
  modified_base 18: mod_base = OTHER; note = 2'-O-methylguanosine-3'-phosphate
  modified_base 19: mod_base = OTHER; note = 2'-O-methylcytidine-3'-phosphorothioate
  modified_base 20: mod_base = OTHER; note = 2'-O-methyluridine-3'-phosphorothioate
  modified_base 21: mod_base = OTHER; note = 2'-O-methyladenosine
cgatgtctgggaacccagcta

SEQ ID NO: 590 - RNA, 21 nt, synthetic construct
  source 1..21: mol_type = other RNA
  modified_base 1: mod_base = OTHER; note = 2'-O-methyladenosine-3'-phosphorothioate
  modified_base 2: mod_base = OTHER; note = 2'-O-methylcytidine-3'-phosphorothioate
  modified_base 3: mod_base = OTHER; note = 2'-O-methylcytidine-3'-phosphate
  modified_base 4: mod_base = OTHER; note = 2'-O-methylcytidine-3'-phosphate
  modified_base 5: mod_base = OTHER; note = 2'-O-methyladenosine-3'-phosphate
  modified_base 6: mod_base = OTHER; note = 2'-O-hexadecyl-guanosine-3'-phosphate
  modified_base 7: mod_base = OTHER; note = 2'-deoxy-2'-fluorocytidine-3'-phosphate
  modified_base 8: mod_base = OTHER; note = 2'-O-methyluridine-3'-phosphate
  modified_base 9: mod_base = OTHER; note = 2'-deoxy-2'-fluoroguanosine-3'-phosphate
  modified_base 10: mod_base = OTHER; note = 2'-deoxy-2'-fluorocytidine-3'-phosphate
  modified_base 11: mod_base = OTHER; note = 2'-deoxy-2'-fluorocytidine-3'-phosphate
  modified_base 12: mod_base = OTHER; note = 2'-O-methyluridine-3'-phosphate
  modified_base 13: mod_base = OTHER; note = 2'-O-methyladenosine-3'-phosphate
  modified_base 14: mod_base = OTHER; note = 2'-O-methyladenosine-3'-phosphate
  modified_base 15: mod_base = OTHER; note = 2'-O-methylcytidine-3'-phosphate
  modified_base 16: mod_base = OTHER; note = 2'-O-methyladenosine-3'-phosphate
  modified_base 17: mod_base = OTHER; note = 2'-O-methyladenosine-3'-phosphate
  modified_base 18: mod_base = OTHER; note = 2'-O-methylcytidine-3'-phosphate
  modified_base 19: mod_base = OTHER; note = 2'-O-methylcytidine-3'-phosphorothioate
  modified_base 20: mod_base = OTHER; note = 2'-O-methylguanosine-3'-phosphorothioate
  modified_base 21: mod_base = OTHER; note = 2'-O-methyladenosine
acccagctgcctaacaaccga

SEQ ID NO: 591 - RNA, 21 nt, synthetic construct
  source 1..21: mol_type = other RNA
  modified_base 1: mod_base = OTHER; note = 2'-O-methyluridine-3'-phosphorothioate
  modified_base 2: mod_base = OTHER; note = 2'-O-methylguanosine-3'-phosphorothioate
  modified_base 3: mod_base = OTHER; note = 2'-O-methylcytidine-3'-phosphate
  modified_base 4: mod_base = OTHER; note = 2'-O-methylcytidine-3'-phosphate
  modified_base 5: mod_base = OTHER; note = 2'-O-methyluridine-3'-phosphate
  modified_base 6: mod_base = OTHER; note = 2'-O-hexadecyl-adenosine-3'-phosphate
  modified_base 7: mod_base = OTHER; note = 2'-deoxy-2'-fluoroadenosine-3'-phosphate
  modified_base 8: mod_base = OTHER; note = 2'-O-methylcytidine-3'-phosphate
  modified_base 9: mod_base = OTHER; note = 2'-deoxy-2'-fluoroadenosine-3'-phosphate
  modified_base 10: mod_base = OTHER; note = 2'-deoxy-2'-fluoroadenosine-3'-phosphate
  modified_base 11: mod_base = OTHER; note = 2'-deoxy-2'-fluorocytidine-3'-phosphate
  modified_base 12: mod_base = OTHER; note = 2'-O-methylcytidine-3'-phosphate
  modified_base 13: mod_base = OTHER; note = 2'-O-methylguanosine-3'-phosphate
  modified_base 14: mod_base = OTHER; note = 2'-O-methylcytidine-3'-phosphate
  modified_base 15: mod_base = OTHER; note = 2'-O-methylcytidine-3'-phosphate
  modified_base 16: mod_base = OTHER; note = 2'-O-methylcytidine-3'-phosphate
  modified_base 17: mod_base = OTHER; note = 2'-O-methyladenosine-3'-phosphate
  modified_base 18: mod_base = OTHER; note = 2'-O-methylcytidine-3'-phosphate
  modified_base 19: mod_base = OTHER; note = 2'-O-methyluridine-3'-phosphorothioate
  modified_base 20: mod_base = OTHER; note = 2'-O-methyluridine-3'-phosphorothioate
  modified_base 21: mod_base = OTHER; note = 2'-O-methyladenosine
tgcctaacaaccgcccactta

SEQ ID NO: 592 - RNA, 21 nt, synthetic construct
  source 1..21: mol_type = other RNA
  modified_base 1: mod_base = OTHER; note = 2'-O-methylcytidine-3'-phosphorothioate
  modified_base 2: mod_base = OTHER; note = 2'-O-methyluridine-3'-phosphorothioate
  modified_base 3: mod_base = OTHER; note = 2'-O-methylcytidine-3'-phosphate
  modified_base 4: mod_base = OTHER; note = 2'-O-methyluridine-3'-phosphate
  modified_base 5: mod_base = OTHER; note = 2'-O-methylcytidine-3'-phosphate
  modified_base 6: mod_base = OTHER; note = 2'-O-hexadecyl-uridine-3'-phosphate
  modified_base 7: mod_base = OTHER; note = 2'-deoxy-2'-fluorouridine-3'-phosphate
  modified_base 8: mod_base = OTHER; note = 2'-O-methylcytidine-3'-phosphate
  modified_base 9: mod_base = OTHER; note = 2'-deoxy-2'-fluoroadenosine-3'-phosphate
  modified_base 10: mod_base = OTHER; note = 2'-deoxy-2'-fluoroadenosine-3'-phosphate
  modified_base 11: mod_base = OTHER; note = 2'-deoxy-2'-fluorocytidine-3'-phosphate
  modified_base 12: mod_base = OTHER; note = 2'-O-methyluridine-3'-phosphate
  modified_base 13: mod_base = OTHER; note = 2'-O-methyluridine-3'-phosphate
  modified_base 14: mod_base = OTHER; note = 2'-O-methylcytidine-3'-phosphate
  modified_base 15: mod_base = OTHER; note = 2'-O-methyladenosine-3'-phosphate
  modified_base 16: mod_base = OTHER; note = 2'-O-methylguanosine-3'-phosphate
  modified_base 17: mod_base = OTHER; note = 2'-O-methyluridine-3'-phosphate
  modified_base 18: mod_base = OTHER; note = 2'-O-methylguanosine-3'-phosphate
  modified_base 19: mod_base = OTHER; note = 2'-O-methylcytidine-3'-phosphorothioate
  modified_base 20: mod_base = OTHER; note = 2'-O-methyluridine-3'-phosphorothioate
  modified_base 21: mod_base = OTHER; note = 2'-O-methyladenosine
ctctcttcaacttcagtgcta

SEQ ID NO: 593 - RNA, 21 nt, synthetic construct
  source 1..21: mol_type = other RNA
  modified_base 1: mod_base = OTHER; note = 2'-O-methylcytidine-3'-phosphorothioate
  modified_base 2: mod_base = OTHER; note = 2'-O-methyladenosine-3'-phosphorothioate
  modified_base 3: mod_base = OTHER; note = 2'-O-methyladenosine-3'-phosphate
  modified_base 4: mod_base = OTHER; note = 2'-O-methylcytidine-3'-phosphate
  modified_base 5: mod_base = OTHER; note = 2'-O-methyluridine-3'-phosphate
  modified_base 6: mod_base = OTHER; note = 2'-O-hexadecyl-uridine-3'-phosphate
  modified_base 7: mod_base = OTHER; note = 2'-deoxy-2'-fluorocytidine-3'-phosphate
  modified_base 8: mod_base = OTHER; note = 2'-O-methyladenosine-3'-phosphate
  modified_base 9: mod_base = OTHER; note = 2'-deoxy-2'-fluoroguanosine-3'-phosphate
  modified_base 10: mod_base = OTHER; note = 2'-deoxy-2'-fluorouridine-3'-phosphate
  modified_base 11: mod_base = OTHER; note = 2'-deoxy-2'-fluoroguanosine-3'-phosphate
  modified_base 12: mod_base = OTHER; note = 2'-O-methylcytidine-3'-phosphate
  modified_base 13: mod_base = OTHER; note = 2'-O-methyluridine-3'-phosphate
  modified_base 14: mod_base = OTHER; note = 2'-O-methylguanosine-3'-phosphate
  modified_base 15: mod_base = OTHER; note = 2'-O-methylguanosine-3'-phosphate
  modified_base 16: mod_base = OTHER; note = 2'-O-methyluridine-3'-phosphate
  modified_base 17: mod_base = OTHER; note = 2'-O-methylguanosine-3'-phosphate
  modified_base 18: mod_base = OTHER; note = 2'-O-methyladenosine-3'-phosphate
  modified_base 19: mod_base = OTHER; note = 2'-O-methyladenosine-3'-phosphorothioate
  modified_base 20: mod_base = OTHER; note = 2'-O-methylcytidine-3'-phosphorothioate
  modified_base 21: mod_base = OTHER; note = 2'-O-methyladenosine
caacttcagtgctggtgaaca

SEQ ID NO: 594 - RNA, 21 nt, synthetic construct
  source 1..21: mol_type = other RNA
  modified_base 1: mod_base = OTHER; note = 2'-O-methyladenosine-3'-phosphorothioate
  modified_base 2: mod_base = OTHER; note = 2'-O-methylguanosine-3'-phosphorothioate
  modified_base 3: mod_base = OTHER; note = 2'-O-methyluridine-3'-phosphate
  modified_base 4: mod_base = OTHER; note = 2'-O-methylguanosine-3'-phosphate
  modified_base 5: mod_base = OTHER; note = 2'-O-methylcytidine-3'-phosphate
  modified_base 6: mod_base = OTHER; note = 2'-O-hexadecyl-uridine-3'-phosphate
  modified_base 7: mod_base = OTHER; note = 2'-deoxy-2'-fluoroguanosine-3'-phosphate
  modified_base 8: mod_base = OTHER; note = 2'-O-methylguanosine-3'-phosphate
  modified_base 9: mod_base = OTHER; note = 2'-deoxy-2'-fluorouridine-3'-phosphate
  modified_base 10: mod_base = OTHER; note = 2'-deoxy-2'-fluoroguanosine-3'-phosphate
  modified_base 11: mod_base = OTHER; note = 2'-deoxy-2'-fluoroadenosine-3'-phosphate
  modified_base 12: mod_base = OTHER; note = 2'-O-methyladenosine-3'-phosphate
  modified_base 13: mod_base = OTHER; note = 2'-O-methylcytidine-3'-phosphate
  modified_base 14: mod_base = OTHER; note = 2'-O-methyluridine-3'-phosphate
  modified_base 15: mod_base = OTHER; note = 2'-O-methylcytidine-3'-phosphate
  modified_base 16: mod_base = OTHER; note = 2'-O-methyluridine-3'-phosphate
  modified_base 17: mod_base = OTHER; note = 2'-O-methylcytidine-3'-phosphate
  modified_base 18: mod_base = OTHER; note = 2'-O-methylcytidine-3'-phosphate
  modified_base 19: mod_base = OTHER; note = 2'-O-methyladenosine-3'-phosphorothioate
  modified_base 20: mod_base = OTHER; note = 2'-O-methyluridine-3'-phosphorothioate
  modified_base 21: mod_base = OTHER; note = 2'-O-methyladenosine
agtgctggtgaactctccata

SEQ ID NO: 595 - RNA, 21 nt, synthetic construct
  source 1..21: mol_type = other RNA
  modified_base 1: mod_base = OTHER; note = 2'-O-methylguanosine-3'-phosphorothioate
  modified_base 2: mod_base = OTHER; note = 2'-O-methylguanosine-3'-phosphorothioate
  modified_base 3: mod_base = OTHER; note = 2'-O-methyluridine-3'-phosphate
  modified_base 4: mod_base = OTHER; note = 2'-O-methylguanosine-3'-phosphate
  modified_base 5: mod_base = OTHER; note = 2'-O-methyladenosine-3'-phosphate
  modified_base 6: mod_base = OTHER; note = 2'-O-hexadecyl-adenosine-3'-phosphate
  modified_base 7: mod_base = OTHER; note = 2'-deoxy-2'-fluorocytidine-3'-phosphate
  modified_base 8: mod_base = OTHER; note = 2'-O-methyluridine-3'-phosphate
  modified_base 9: mod_base = OTHER; note = 2'-deoxy-2'-fluorocytidine-3'-phosphate
  modified_base 10: mod_base = OTHER; note = 2'-deoxy-2'-fluorouridine-3'-phosphate
  modified_base 11: mod_base = OTHER; note = 2'-deoxy-2'-fluorocytidine-3'-phosphate
  modified_base 12: mod_base = OTHER; note = 2'-O-methylcytidine-3'-phosphate
  modified_base 13: mod_base = OTHER; note = 2'-O-methyladenosine-3'-phosphate
  modified_base 14: mod_base = OTHER; note = 2'-O-methyluridine-3'-phosphate
  modified_base 15: mod_base = OTHER; note = 2'-O-methylcytidine-3'-phosphate
  modified_base 16: mod_base = OTHER; note = 2'-O-methylcytidine-3'-phosphate
  modified_base 17: mod_base = OTHER; note = 2'-O-methyladenosine-3'-phosphate
  modified_base 18: mod_base = OTHER; note = 2'-O-methyladenosine-3'-phosphate
  modified_base 19: mod_base = OTHER; note = 2'-O-methylcytidine-3'-phosphorothioate
  modified_base 20: mod_base = OTHER; note = 2'-O-methylcytidine-3'-phosphorothioate
  modified_base 21: mod_base = OTHER; note = 2'-O-methyladenosine
ggtgaactctccatccaacca

SEQ ID NO: 596 - RNA, 21 nt, synthetic construct
  source 1..21: mol_type = other RNA
  modified_base 1: mod_base = OTHER; note = 2'-O-methyluridine-3'-phosphorothioate
  modified_base 2: mod_base = OTHER; note = 2'-O-methylcytidine-3'-phosphorothioate
  modified_base 3: mod_base = OTHER; note = 2'-O-methylcytidine-3'-phosphate
  modified_base 4: mod_base = OTHER; note = 2'-O-methyladenosine-3'-phosphate
  modified_base 5: mod_base = OTHER; note = 2'-O-methyluridine-3'-phosphate
  modified_base 6: mod_base = OTHER; note = 2'-O-hexadecyl-cytidine-3'-phosphate
  modified_base 7: mod_base = OTHER; note = 2'-deoxy-2'-fluorocytidine-3'-phosphate
  modified_base 8: mod_base = OTHER; note = 2'-O-methyladenosine-3'-phosphate
  modified_base 9: mod_base = OTHER; note = 2'-deoxy-2'-fluoroadenosine-3'-phosphate
  modified_base 10: mod_base = OTHER; note = 2'-deoxy-2'-fluorocytidine-3'-phosphate
  modified_base 11: mod_base = OTHER; note = 2'-deoxy-2'-fluorocytidine-3'-phosphate
  modified_base 12: mod_base = OTHER; note = 2'-O-methylguanosine-3'-phosphate
  modified_base 13: mod_base = OTHER; note = 2'-O-methyluridine-3'-phosphate
  modified_base 14: mod_base = OTHER; note = 2'-O-methylcytidine-3'-phosphate
  modified_base 15: mod_base = OTHER; note = 2'-O-methyluridine-3'-phosphate
  modified_base 16: mod_base = OTHER; note = 2'-O-methylcytidine-3'-phosphate
  modified_base 17: mod_base = OTHER; note = 2'-O-methyluridine-3'-phosphate
  modified_base 18: mod_base = OTHER; note = 2'-O-methylcytidine-3'-phosphate
  modified_base 19: mod_base = OTHER; note = 2'-O-methyladenosine-3'-phosphorothioate
  modified_base 20: mod_base = OTHER; note = 2'-O-methyladenosine-3'-phosphorothioate
  modified_base 21: mod_base = OTHER; note = 2'-O-methyladenosine
tccatccaaccgtctctcaaa

SEQ ID NO: 597 - RNA, 21 nt, synthetic construct
  source 1..21: mol_type = other RNA
  modified_base 1: mod_base = OTHER; note = 2'-O-methylcytidine-3'-phosphorothioate
  modified_base 2: mod_base = OTHER; note = 2'-O-methyladenosine-3'-phosphorothioate
  modified_base 3: mod_base = OTHER; note = 2'-O-methyladenosine-3'-phosphate
  modified_base 4: mod_base = OTHER; note = 2'-O-methylcytidine-3'-phosphate
  modified_base 5: mod_base = OTHER; note = 2'-O-methylcytidine-3'-phosphate
  modified_base 6: mod_base = OTHER; note = 2'-O-hexadecyl-guanosine-3'-phosphate
  modified_base 7: mod_base = OTHER; note = 2'-deoxy-2'-fluorouridine-3'-phosphate
  modified_base 8: mod_base = OTHER; note = 2'-O-methylcytidine-3'-phosphate
  modified_base 9: mod_base = OTHER; note = 2'-deoxy-2'-fluorouridine-3'-phosphate
  modified_base 10: mod_base = OTHER; note = 2'-deoxy-2'-fluorocytidine-3'-phosphate
  modified_base 11: mod_base = OTHER; note = 2'-deoxy-2'-fluorouridine-3'-phosphate
  modified_base 12: mod_base = OTHER; note = 2'-O-methylcytidine-3'-phosphate
  modified_base 13: mod_base = OTHER; note = 2'-O-methyladenosine-3'-phosphate
  modified_base 14: mod_base = OTHER; note = 2'-O-methyladenosine-3'-phosphate
  modified_base 15: mod_base = OTHER; note = 2'-O-methylcytidine-3'-phosphate
  modified_base 16: mod_base = OTHER; note = 2'-O-methylguanosine-3'-phosphate
  modified_base 17: mod_base = OTHER; note = 2'-O-methylcytidine-3'-phosphate
  modified_base 18: mod_base = OTHER; note = 2'-O-methylcytidine-3'-phosphate
  modified_base 19: mod_base = OTHER; note = 2'-O-methyladenosine-3'-phosphorothioate
  modified_base 20: mod_base = OTHER; note = 2'-O-methyluridine-3'-phosphorothioate
  modified_base 21: mod_base = OTHER; note = 2'-O-methyladenosine
caaccgtctctcaacgccata

SEQ ID NO: 598 - RNA, 21 nt, synthetic construct
  source 1..21: mol_type = other RNA
  modified_base 1: mod_base = OTHER; note = 2'-O-methyluridine-3'-phosphorothioate
  modified_base 2: mod_base = OTHER; note = 2'-O-methylcytidine-3'-phosphorothioate
  modified_base 3: mod_base = OTHER; note = 2'-O-methyluridine-3'-phosphate
  modified_base 4: mod_base = OTHER; note = 2'-O-methylcytidine-3'-phosphate
  modified_base 5: mod_base = OTHER; note = 2'-O-methyluridine-3'-phosphate
  modified_base 6: mod_base = OTHER; note = 2'-O-hexadecyl-cytidine-3'-phosphate
  modified_base 7: mod_base = OTHER; note = 2'-deoxy-2'-fluoroadenosine-3'-phosphate
  modified_base 8: mod_base = OTHER; note = 2'-O-methyladenosine-3'-phosphate
  modified_base 9: mod_base = OTHER; note = 2'-deoxy-2'-fluorocytidine-3'-phosphate
  modified_base 10: mod_base = OTHER; note = 2'-deoxy-2'-fluoroguanosine-3'-phosphate
  modified_base 11: mod_base = OTHER; note = 2'-deoxy-2'-fluorocytidine-3'-phosphate
  modified_base 12: mod_base = OTHER; note = 2'-O-methylcytidine-3'-phosphate
  modified_base 13: mod_base = OTHER; note = 2'-O-methyladenosine-3'-phosphate
  modified_base 14: mod_base = OTHER; note = 2'-O-methyluridine-3'-phosphate
  modified_base 15: mod_base = OTHER; note = 2'-O-methyluridine-3'-phosphate
  modified_base 16: mod_base = OTHER; note = 2'-O-methylcytidine-3'-phosphate
  modified_base 17: mod_base = OTHER; note = 2'-O-methyluridine-3'-phosphate
  modified_base 18: mod_base = OTHER; note = 2'-O-methylcytidine-3'-phosphate
  modified_base 19: mod_base = OTHER; note = 2'-O-methyladenosine-3'-phosphorothioate
  modified_base 20: mod_base = OTHER; note = 2'-O-methyluridine-3'-phosphorothioate
  modified_base 21: mod_base = OTHER; note = 2'-O-methyladenosine
tctctcaacgccattctcata

SEQ ID NO: 599 - RNA, 21 nt, synthetic construct
  source 1..21: mol_type = other RNA
  modified_base 1: mod_base = OTHER; note = 2'-O-methyladenosine-3'-phosphorothioate
  modified_base 2: mod_base = OTHER; note = 2'-O-methylcytidine-3'-phosphorothioate
  modified_base 3: mod_base = OTHER; note = 2'-O-methylguanosine-3'-phosphate
  modified_base 4: mod_base = OTHER; note = 2'-O-methylcytidine-3'-phosphate
  modified_base 5: mod_base = OTHER; note = 2'-O-methylcytidine-3'-phosphate
  modified_base 6: mod_base = OTHER; note = 2'-O-hexadecyl-adenosine-3'-phosphate
  modified_base 7: mod_base = OTHER; note = 2'-deoxy-2'-fluorouridine-3'-phosphate
  modified_base 8: mod_base = OTHER; note = 2'-O-methyluridine-3'-phosphate
  modified_base 9: mod_base = OTHER; note = 2'-deoxy-2'-fluorocytidine-3'-phosphate
  modified_base 10: mod_base = OTHER; note = 2'-deoxy-2'-fluorouridine-3'-phosphate
  modified_base 11: mod_base = OTHER; note = 2'-deoxy-2'-fluorocytidine-3'-phosphate
  modified_base 12: mod_base = OTHER; note = 2'-O-methyladenosine-3'-phosphate
  modified_base 13: mod_base = OTHER; note = 2'-O-methyluridine-3'-phosphate
  modified_base 14: mod_base = OTHER; note = 2'-O-methylcytidine-3'-phosphate
  modified_base 15: mod_base = OTHER; note = 2'-O-methylcytidine-3'-phosphate
  modified_base 16: mod_base = OTHER; note = 2'-O-methylcytidine-3'-phosphate
  modified_base 17: mod_base = OTHER; note = 2'-O-methyluridine-3'-phosphate
  modified_base 18: mod_base = OTHER; note = 2'-O-methylcytidine-3'-phosphate
  modified_base 19: mod_base = OTHER; note = 2'-O-methylcytidine-3'-phosphorothioate
  modified_base 20: mod_base = OTHER; note = 2'-O-methyluridine-3'-phosphorothioate
  modified_base 21: mod_base = OTHER; note = 2'-O-methyladenosine
acgccattctcatccctccta

SEQ ID NO: 600 - RNA, 21 nt, synthetic construct
  source 1..21: mol_type = other RNA
  modified_base 1: mod_base = OTHER; note = 2'-O-methylguanosine-3'-phosphorothioate
  modified_base 2: mod_base = OTHER; note = 2'-O-methyluridine-3'-phosphorothioate
  modified_base 3: mod_base = OTHER; note = 2'-O-methylcytidine-3'-phosphate
  modified_base 4: mod_base = OTHER; note = 2'-O-methylcytidine-3'-phosphate
  modified_base 5: mod_base = OTHER; note = 2'-O-methyluridine-3'-phosphate
  modified_base 6: mod_base = OTHER; note = 2'-O-hexadecyl-cytidine-3'-phosphate
  modified_base 7: mod_base = OTHER; note = 2'-deoxy-2'-fluoroadenosine-3'-phosphate
  modified_base 8: mod_base = OTHER; note = 2'-O-methylcytidine-3'-phosphate
  modified_base 9: mod_base = OTHER; note = 2'-deoxy-2'-fluoroadenosine-3'-phosphate
  modified_base 10: mod_base = OTHER; note = 2'-deoxy-2'-fluoroadenosine-3'-phosphate
  modified_base 11: mod_base = OTHER; note = 2'-deoxy-2'-fluoroguanosine-3'-phosphate
  modified_base 12: mod_base = OTHER; note = 2'-O-methylcytidine-3'-phosphate
  modified_base 13: mod_base = OTHER; note = 2'-O-methyluridine-3'-phosphate
  modified_base 14: mod_base = OTHER; note = 2'-O-methyluridine-3'-phosphate
  modified_base 15: mod_base = OTHER; note = 2'-O-methyluridine-3'-phosphate
  modified_base 16: mod_base = OTHER; note = 2'-O-methyladenosine-3'-phosphate
  modified_base 17: mod_base = OTHER; note = 2'-O-methyladenosine-3'-phosphate
  modified_base 18: mod_base = OTHER; note = 2'-O-methylcytidine-3'-phosphate
  modified_base 19: mod_base = OTHER; note = 2'-O-methyluridine-3'-phosphorothioate
  modified_base 20: mod_base = OTHER; note = 2'-O-methylguanosine-3'-phosphorothioate
  modified_base 21: mod_base = OTHER; note = 2'-O-methyladenosine
gtcctcacaagctttaactga

SEQ ID NO: 601 - RNA, 21 nt, synthetic construct
  source 1..21: mol_type = other RNA
  modified_base 1: mod_base = OTHER; note = 2'-O-methyluridine-3'-phosphorothioate
  modified_base 2: mod_base = OTHER; note = 2'-O-methylcytidine-3'-phosphorothioate
  modified_base 3: mod_base = OTHER; note = 2'-O-methyluridine-3'-phosphate
  modified_base 4: mod_base = OTHER; note = 2'-O-methylcytidine-3'-phosphate
  modified_base 5: mod_base = OTHER; note = 2'-O-methyladenosine-3'-phosphate
  modified_base 6: mod_base = OTHER; note = 2'-O-hexadecyl-uridine-3'-phosphate
  modified_base 7: mod_base = OTHER; note = 2'-deoxy-2'-fluorocytidine-3'-phosphate
  modified_base 8: mod_base = OTHER; note = 2'-O-methylcytidine-3'-phosphate
  modified_base 9: mod_base = OTHER; note = 2'-deoxy-2'-fluorocytidine-3'-phosphate
  modified_base 10: mod_base = OTHER; note = 2'-deoxy-2'-fluorouridine-3'-phosphate
  modified_base 11: mod_base = OTHER; note = 2'-deoxy-2'-fluorocytidine-3'-phosphate
  modified_base 12: mod_base = OTHER; note = 2'-O-methylcytidine-3'-phosphate
  modified_base 13: mod_base = OTHER; note = 2'-O-methyluridine-3'-phosphate
  modified_base 14: mod_base = OTHER; note = 2'-O-methylcytidine-3'-phosphate
  modified_base 15: mod_base = OTHER; note = 2'-O-methyladenosine-3'-phosphate
  modified_base 16: mod_base = OTHER; note = 2'-O-methylcytidine-3'-phosphate
  modified_base 17: mod_base = OTHER; note = 2'-O-methyluridine-3'-phosphate
  modified_base 18: mod_base = OTHER; note = 2'-O-methyluridine-3'-phosphate
  modified_base 19: mod_base = OTHER; note = 2'-O-methylguanosine-3'-phosphorothioate
  modified_base 20: mod_base = OTHER; note = 2'-O-methyladenosine-3'-phosphorothioate
  modified_base 21: mod_base = OTHER; note = 2'-O-methyladenosine
tctcatccctcctcacttgaa

SEQ ID NO: 602 - RNA, 21 nt, synthetic construct
  source 1..21: mol_type = other RNA
  modified_base 1: mod_base = OTHER; note = 2'-O-methyladenosine-3'-phosphorothioate
  modified_base 2: mod_base = OTHER; note = 2'-O-methylcytidine-3'-phosphorothioate
  modified_base 3: mod_base = OTHER; note = 2'-O-methyladenosine-3'-phosphate
  modified_base 4: mod_base = OTHER; note = 2'-O-methyladenosine-3'-phosphate
  modified_base 5: mod_base = OTHER; note = 2'-O-methylguanosine-3'-phosphate
  modified_base 6: mod_base = OTHER; note = 2'-O-hexadecyl-cytidine-3'-phosphate
  modified_base 7: mod_base = OTHER; note = 2'-deoxy-2'-fluorouridine-3'-phosphate
  modified_base 8: mod_base = OTHER; note = 2'-O-methyluridine-3'-phosphate
  modified_base 9: mod_base = OTHER; note = 2'-deoxy-2'-fluorouridine-3'-phosphate
  modified_base 10: mod_base = OTHER; note = 2'-deoxy-2'-fluoroadenosine-3'-phosphate
  modified_base 11: mod_base = OTHER; note = 2'-deoxy-2'-fluoroadenosine-3'-phosphate
  modified_base 12: mod_base = OTHER; note = 2'-O-methylcytidine-3'-phosphate
  modified_base 13: mod_base = OTHER; note = 2'-O-methyluridine-3'-phosphate
  modified_base 14: mod_base = OTHER; note = 2'-O-methylguanosine-3'-phosphate
  modified_base 15: mod_base = OTHER; note = 2'-O-methyladenosine-3'-phosphate
  modified_base 16: mod_base = OTHER; note = 2'-O-methylguanosine-3'-phosphate
  modified_base 17: mod_base = OTHER; note = 2'-O-methyladenosine-3'-phosphate
  modified_base 18: mod_base = OTHER; note = 2'-O-methylcytidine-3'-phosphate
  modified_base 19: mod_base = OTHER; note = 2'-O-methyluridine-3'-phosphorothioate
  modified_base 20: mod_base = OTHER; note = 2'-O-methylcytidine-3'-phosphorothioate
  modified_base 21: mod_base = OTHER; note = 2'-O-methyladenosine
acaagctttaactgagactca

SEQ ID NO: 603 - RNA, 21 nt, synthetic construct
  source 1..21: mol_type = other RNA
  modified_base 1: mod_base = OTHER; note = 2'-O-methyluridine-3'-phosphorothioate
  modified_base 2: mod_base = OTHER; note = 2'-O-methyluridine-3'-phosphorothioate
  modified_base 3: mod_base = OTHER; note = 2'-O-methyluridine-3'-phosphate
  modified_base 4: mod_base = OTHER; note = 2'-O-methyladenosine-3'-phosphate
  modified_base 5: mod_base = OTHER; note = 2'-O-methyladenosine-3'-phosphate
  modified_base 6: mod_base = OTHER; note = 2'-O-hexadecyl-cytidine-3'-phosphate
  modified_base 7: mod_base = OTHER; note = 2'-deoxy-2'-fluorouridine-3'-phosphate
  modified_base 8: mod_base = OTHER; note = 2'-O-methylguanosine-3'-phosphate
  modified_base 9: mod_base = OTHER; note = 2'-deoxy-2'-fluoroadenosine-3'-phosphate
  modified_base 10: mod_base = OTHER; note = 2'-deoxy-2'-fluoroguanosine-3'-phosphate
  modified_base 11: mod_base = OTHER; note = 2'-deoxy-2'-fluoroadenosine-3'-phosphate
  modified_base 12: mod_base = OTHER; note = 2'-O-methylcytidine-3'-phosphate
  modified_base 13: mod_base = OTHER; note = 2'-O-methyluridine-3'-phosphate
  modified_base 14: mod_base = OTHER; note = 2'-O-methylcytidine-3'-phosphate
  modified_base 15: mod_base = OTHER; note = 2'-O-methylcytidine-3'-phosphate
  modified_base 16: mod_base = OTHER; note = 2'-O-methylguanosine-3'-phosphate
  modified_base 17: mod_base = OTHER; note = 2'-O-methyladenosine-3'-phosphate
  modified_base 18: mod_base = OTHER; note = 2'-O-methylcytidine-3'-phosphate
  modified_base 19: mod_base = OTHER; note = 2'-O-methylcytidine-3'-phosphorothioate
  modified_base 20: mod_base = OTHER; note = 2'-O-methyladenosine-3'-phosphorothioate
  modified_base 21: mod_base = OTHER; note = 2'-O-methyladenosine
tttaactgagactccgaccaa

SEQ ID NO: 604 - RNA, 21 nt, synthetic construct
  source 1..21: mol_type = other RNA
  modified_base 1: mod_base = OTHER; note = 2'-O-methylcytidine-3'-phosphorothioate
  modified_base 2: mod_base = OTHER; note = 2'-O-methylcytidine-3'-phosphorothioate
  modified_base 3: mod_base = OTHER; note = 2'-O-methyladenosine-3'-phosphate
  modified_base 4: mod_base = OTHER; note = 2'-O-methylguanosine-3'-phosphate
  modified_base 5: mod_base = OTHER; note = 2'-O-methylcytidine-3'-phosphate
  modified_base 6: mod_base = OTHER; note = 2'-O-hexadecyl-uridine-3'-phosphate
  modified_base 7: mod_base = OTHER; note = 2'-deoxy-2'-fluorocytidine-3'-phosphate
  modified_base 8: mod_base = OTHER; note = 2'-O-methyladenosine-3'-phosphate
  modified_base 9: mod_base = OTHER; note = 2'-deoxy-2'-fluoroguanosine-3'-phosphate
  modified_base 10: mod_base = OTHER; note = 2'-deoxy-2'-fluoroadenosine-3'-phosphate
  modified_base 11: mod_base = OTHER; note = 2'-deoxy-2'-fluorocytidine-3'-phosphate
  modified_base 12: mod_base = OTHER; note = 2'-O-methyluridine-3'-phosphate
  modified_base 13: mod_base = OTHER; note = 2'-O-methylguanosine-3'-phosphate
  modified_base 14: mod_base = OTHER; note = 2'-O-methylguanosine-3'-phosphate
  modified_base 15: mod_base = OTHER; note = 2'-O-methylcytidine-3'-phosphate
  modified_base 16: mod_base = OTHER; note = 2'-O-methyladenosine-3'-phosphate
  modified_base 17: mod_base = OTHER; note = 2'-O-methylguanosine-3'-phosphate
  modified_base 18: mod_base = OTHER; note = 2'-O-methyluridine-3'-phosphate
  modified_base 19: mod_base = OTHER; note = 2'-O-methylcytidine-3'-phosphorothioate
  modified_base 20: mod_base = OTHER; note = 2'-O-methylguanosine-3'-phosphorothioate
  modified_base 21: mod_base = OTHER; note = 2'-O-methyladenosine
ccagctcagactggcagtcga

SEQ ID NO: 605 - RNA, 21 nt, synthetic construct
  source 1..21: mol_type = other RNA
  modified_base 1: mod_base = OTHER; note = 2'-O-methyluridine-3'-phosphorothioate
  modified_base 2: mod_base = OTHER; note = 2'-O-methylguanosine-3'-phosphorothioate
  modified_base 3: mod_base = OTHER; note = 2'-O-methylguanosine-3'-phosphate
  modified_base 4: mod_base = OTHER; note = 2'-O-methylcytidine-3'-phosphate
  modified_base 5: mod_base = OTHER; note = 2'-O-methyladenosine-3'-phosphate
  modified_base 6: mod_base = OTHER; note = 2'-O-hexadecyl-guanosine-3'-phosphate
  modified_base 7: mod_base = OTHER; note = 2'-deoxy-2'-fluorouridine-3'-phosphate
  modified_base 8: mod_base = OTHER; note = 2'-O-methylcytidine-3'-phosphate
  modified_base 9: mod_base = OTHER; note = 2'-deoxy-2'-fluoroguanosine-3'-phosphate
  modified_base 10: mod_base = OTHER; note = 2'-deoxy-2'-fluoroadenosine-3'-phosphate
  modified_base 11: mod_base = OTHER; note = 2'-deoxy-2'-fluorocytidine-3'-phosphate
  modified_base 12: mod_base = OTHER; note = 2'-O-methylcytidine-3'-phosphate
  modified_base 13: mod_base = OTHER; note = 2'-O-methylguanosine-3'-phosphate
  modified_base 14: mod_base = OTHER; note = 2'-O-methyladenosine-3'-phosphate
  modified_base 15: mod_base = OTHER; note = 2'-O-methyluridine-3'-phosphate
  modified_base 16: mod_base = OTHER; note = 2'-O-methylguanosine-3'-phosphate
  modified_base 17: mod_base = OTHER; note = 2'-O-methylcytidine-3'-phosphate
  modified_base 18: mod_base = OTHER; note = 2'-O-methylcytidine-3'-phosphate
  modified_base 19: mod_base = OTHER; note = 2'-O-methyladenosine-3'-phosphorothioate
  modified_base 20: mod_base = OTHER; note = 2'-O-methylcytidine-3'-phosphorothioate
  modified_base 21: mod_base = OTHER; note = 2'-O-methyladenosine
tggcagtcgaccgatgccaca

SEQ ID NO: 606 - RNA, 21 nt, synthetic construct
  source 1..21: mol_type = other RNA
  modified_base 1: mod_base = OTHER; note = 2'-O-methyluridine-3'-phosphorothioate
  modified_base 2: mod_base = OTHER; note = 2'-O-methylcytidine-3'-phosphorothioate
  modified_base 3: mod_base = OTHER; note = 2'-O-methylguanosine-3'-phosphate
  modified_base 4: mod_base = OTHER; note = 2'-O-methyladenosine-3'-phosphate
  modified_base 5: mod_base = OTHER; note = 2'-O-methylcytidine-3'-phosphate
  modified_base 6: mod_base = OTHER; note = 2'-O-hexadecyl-cytidine-3'-phosphate
  modified_base 7: mod_base = OTHER; note = 2'-deoxy-2'-fluoroguanosine-3'-phosphate
  modified_base 8: mod_base = OTHER; note = 2'-O-methyladenosine-3'-phosphate
  modified_base 9: mod_base = OTHER; note = 2'-deoxy-2'-fluorouridine-3'-phosphate
  modified_base 10: mod_base = OTHER; note = 2'-deoxy-2'-fluoroguanosine-3'-phosphate
  modified_base 11: mod_base = OTHER; note = 2'-deoxy-2'-fluorocytidine-3'-phosphate
  modified_base 12: mod_base = OTHER; note = 2'-O-methylcytidine-3'-phosphate
  modified_base 13: mod_base = OTHER; note = 2'-O-methyladenosine-3'-phosphate
  modified_base 14: mod_base = OTHER; note = 2'-O-methylcytidine-3'-phosphate
  modified_base 15: mod_base = OTHER; note = 2'-O-methyladenosine-3'-phosphate
  modified_base 16: mod_base = OTHER; note = 2'-O-methylcytidine-3'-phosphate
  modified_base 17: mod_base = OTHER; note = 2'-O-methylcytidine-3'-phosphate
  modified_base 18: mod_base = OTHER; note = 2'-O-methyluridine-3'-phosphate
  modified_base 19: mod_base = OTHER; note = 2'-O-methyladenosine-3'-phosphorothioate
  modified_base 20: mod_base = OTHER; note = 2'-O-methylcytidine-3'-phosphorothioate
  modified_base 21: mod_base = OTHER; note = 2'-O-methyladenosine
tcgaccgatgccacacctaca

SEQ ID NO: 607 - RNA, 21 nt, synthetic construct
  source 1..21: mol_type = other RNA
  modified_base 1: mod_base = OTHER; note = 2'-O-methyladenosine-3'-phosphorothioate
  modified_base 2: mod_base = OTHER; note = 2'-O-methyluridine-3'-phosphorothioate
  modified_base 3: mod_base = OTHER; note = 2'-O-methylguanosine-3'-phosphate
  modified_base 4: mod_base = OTHER; note = 2'-O-methylcytidine-3'-phosphate
  modified_base 5: mod_base = OTHER; note = 2'-O-methylcytidine-3'-phosphate
  modified_base 6: mod_base = OTHER; note = 2'-O-hexadecyl-adenosine-3'-phosphate
  modified_base 7: mod_base = OTHER; note = 2'-deoxy-2'-fluorocytidine-3'-phosphate
  modified_base 8: mod_base = OTHER; note = 2'-O-methyladenosine-3'-phosphate
  modified_base 9: mod_base = OTHER; note = 2'-deoxy-2'-fluorocytidine-3'-phosphate
  modified_base 10: mod_base = OTHER; note = 2'-deoxy-2'-fluorocytidine-3'-phosphate
  modified_base 11: mod_base = OTHER; note = 2'-deoxy-2'-fluorouridine-3'-phosphate
  modified_base 12: mod_base = OTHER; note = 2'-O-methyladenosine-3'-phosphate
  modified_base 13: mod_base = OTHER; note = 2'-O-methylcytidine-3'-phosphate
  modified_base 14: mod_base = OTHER; note = 2'-O-methylcytidine-3'-phosphate
  modified_base 15: mod_base = OTHER; note = 2'-O-methylcytidine-3'-phosphate
  modified_base 16: mod_base = OTHER; note = 2'-O-methyluridine-3'-phosphate
  modified_base 17: mod_base = OTHER; note = 2'-O-methylcytidine-3'-phosphate
  modified_base 18: mod_base = OTHER; note = 2'-O-methyladenosine-3'-phosphate
  modified_base 19: mod_base = OTHER; note = 2'-O-methylcytidine-3'-phosphorothioate
  modified_base 20: mod_base = OTHER; note = 2'-O-methyluridine-3'-phosphorothioate
  modified_base 21: mod_base = OTHER; note = 2'-O-methyladenosine
atgccacacctaccctcacta

SEQ ID NO: 608 - RNA, 21 nt, synthetic construct
  source 1..21: mol_type = other RNA
  modified_base 1: mod_base = OTHER; note = 2'-O-methyladenosine-3'-phosphorothioate
  modified_base 2: mod_base = OTHER; note = 2'-O-methylcytidine-3'-phosphorothioate
  modified_base 3: mod_base = OTHER; note = 2'-O-methylcytidine-3'-phosphate
  modified_base 4: mod_base = OTHER; note = 2'-O-methyluridine-3'-phosphate
  modified_base 5: mod_base = OTHER; note = 2'-O-methyladenosine-3'-phosphate
  modified_base 6: mod_base = OTHER; note = 2'-O-hexadecyl-cytidine-3'-phosphate
  modified_base 7: mod_base = OTHER; note = 2'-deoxy-2'-fluorocytidine-3'-phosphate
  modified_base 8: mod_base = OTHER; note = 2'-O-methylcytidine-3'-phosphate
  modified_base 9: mod_base = OTHER; note = 2'-deoxy-2'-fluorouridine-3'-phosphate
  modified_base 10: mod_base = OTHER; note = 2'-deoxy-2'-fluorocytidine-3'-phosphate
  modified_base 11: mod_base = OTHER; note = 2'-deoxy-2'-fluoroadenosine-3'-phosphate
  modified_base 12: mod_base = OTHER; note = 2'-O-methylcytidine-3'-phosphate
  modified_base 13: mod_base = OTHER; note = 2'-O-methyluridine-3'-phosphate
  modified_base 14: mod_base = OTHER; note = 2'-O-methyladenosine-3'-phosphate
  modified_base 15: mod_base = OTHER; note = 2'-O-methyladenosine-3'-phosphate
  modified_base 16: mod_base = OTHER; note = 2'-O-methylcytidine-3'-phosphate
  modified_base 17: mod_base = OTHER; note = 2'-O-methyluridine-3'-phosphate
  modified_base 18: mod_base = OTHER; note = 2'-O-methylcytidine-3'-phosphate
  modified_base 19: mod_base = OTHER; note = 2'-O-methylcytidine-3'-phosphorothioate
  modified_base 20: mod_base = OTHER; note = 2'-O-methyluridine-3'-phosphorothioate
  modified_base 21: mod_base = OTHER; note = 2'-O-methyladenosine
acctaccctcactaactccta

SEQ ID NO: 609 - RNA, 21 nt, synthetic construct
  source 1..21: mol_type = other RNA
  modified_base 1: mod_base = OTHER; note = 2'-O-methylcytidine-3'-phosphorothioate
  modified_base 2: mod_base = OTHER; note = 2'-O-methylcytidine-3'-phosphorothioate
  modified_base 3: mod_base = OTHER; note = 2'-O-methyluridine-3'-phosphate
  modified_base 4: mod_base = OTHER; note = 2'-O-methylcytidine-3'-phosphate
  modified_base 5: mod_base = OTHER; note = 2'-O-methyladenosine-3'-phosphate
  modified_base 6: mod_base = OTHER; note = 2'-O-hexadecyl-cytidine-3'-phosphate
  modified_base 7: mod_base = OTHER; note = 2'-deoxy-2'-fluorouridine-3'-phosphate
  modified_base 8: mod_base = OTHER; note = 2'-O-methyladenosine-3'-phosphate
  modified_base 9: mod_base = OTHER; note = 2'-deoxy-2'-fluoroadenosine-3'-phosphate
  modified_base 10: mod_base = OTHER; note = 2'-deoxy-2'-fluorocytidine-3'-phosphate
  modified_base 11: mod_base = OTHER; note = 2'-deoxy-2'-fluorouridine-3'-phosphate
  modified_base 12: mod_base = OTHER; note = 2'-O-methylcytidine-3'-phosphate
  modified_base 13: mod_base = OTHER; note = 2'-O-methylcytidine-3'-phosphate
  modified_base 14: mod_base = OTHER; note = 2'-O-methyluridine-3'-phosphate
  modified_base 15: mod_base = OTHER; note = 2'-O-methylcytidine-3'-phosphate
  modified_base 16: mod_base = OTHER; note = 2'-O-methylcytidine-3'-phosphate
  modified_base 17: mod_base = OTHER; note = 2'-O-methyluridine-3'-phosphate
  modified_base 18: mod_base = OTHER; note = 2'-O-methylguanosine-3'-phosphate
  modified_base 19: mod_base = OTHER; note = 2'-O-methyladenosine-3'-phosphorothioate
  modified_base 20: mod_base = OTHER; note = 2'-O-methylguanosine-3'-phosphorothioate
  modified_base 21: mod_base = OTHER; note = 2'-O-methyladenosine
cctcactaactcctcctgaga

SEQ ID NO: 610 - RNA, 21 nt, synthetic construct
  source 1..21: mol_type = other RNA
  modified_base 1: mod_base = OTHER; note = 2'-O-methylcytidine-3'-phosphorothioate
  modified_base 2: mod_base = OTHER; note = 2'-O-methyladenosine-3'-phosphorothioate
  modified_base 3: mod_base = OTHER; note = 2'-O-methylcytidine-3'-phosphate
  modified_base 4: mod_base = OTHER; note = 2'-O-methylcytidine-3'-phosphate
  modified_base 5: mod_base = OTHER; note = 2'-O-methyladenosine-3'-phosphate
  modified_base 6: mod_base = OTHER; note = 2'-O-hexadecyl-adenosine-3'-phosphate
  modified_base 7: mod_base = OTHER; note = 2'-deoxy-2'-fluoroguanosine-3'-phosphate
  modified_base 8: mod_base = OTHER; note = 2'-O-methylcytidine-3'-phosphate
  modified_base 9: mod_base = OTHER; note = 2'-deoxy-2'-fluoroadenosine-3'-phosphate
  modified_base 10: mod_base = OTHER; note = 2'-deoxy-2'-fluorocytidine-3'-phosphate
  modified_base 11: mod_base = OTHER; note = 2'-deoxy-2'-fluorocytidine-3'-phosphate
  modified_base 12: mod_base = OTHER; note = 2'-O-methylcytidine-3'-phosphate
  modified_base 13: mod_base = OTHER; note = 2'-O-methyluridine-3'-phosphate
  modified_base 14: mod_base = OTHER; note = 2'-O-methyluridine-3'-phosphate
  modified_base 15: mod_base = OTHER; note = 2'-O-methylcytidine-3'-phosphate
  modified_base 16: mod_base = OTHER; note = 2'-O-methylcytidine-3'-phosphate
  modified_base 17: mod_base = OTHER; note = 2'-O-methyladenosine-3'-phosphate
  modified_base 18: mod_base = OTHER; note = 2'-O-methylcytidine-3'-phosphate
  modified_base 19: mod_base = OTHER; note = 2'-O-methyluridine-3'-phosphorothioate
  modified_base 20: mod_base = OTHER; note = 2'-O-methyluridine-3'-phosphorothioate
  modified_base 21: mod_base = OTHER; note = 2'-O-methyladenosine
caccaagcacccttccactta

SEQ ID NO: 611 - RNA, 21 nt, synthetic construct
  source 1..21: mol_type = other RNA
  modified_base 1: mod_base = OTHER; note = 2'-O-methyladenosine-3'-phosphorothioate
  modified_base 2: mod_base = OTHER; note = 2'-O-methylcytidine-3'-phosphorothioate
  modified_base 3: mod_base = OTHER; note = 2'-O-methylcytidine-3'-phosphate
  modified_base 4: mod_base = OTHER; note = 2'-O-methylcytidine-3'-phosphate
  modified_base 5: mod_base = OTHER; note = 2'-O-methyluridine-3'-phosphate
  modified_base 6: mod_base = OTHER; note = 2'-O-hexadecyl-uridine-3'-phosphate
  modified_base 7: mod_base = OTHER; note = 2'-deoxy-2'-fluorocytidine-3'-phosphate
  modified_base 8: mod_base = OTHER; note = 2'-O-methylcytidine-3'-phosphate
  modified_base 9: mod_base = OTHER; note = 2'-deoxy-2'-fluoroadenosine-3'-phosphate
  modified_base 10: mod_base = OTHER; note = 2'-deoxy-2'-fluorocytidine-3'-phosphate
  modified_base 11: mod_base = OTHER; note = 2'-deoxy-2'-fluorouridine-3'-phosphate
  modified_base 12: mod_base = OTHER; note = 2'-O-methyluridine-3'-phosphate
  modified_base 13: mod_base = OTHER; note = 2'-O-methylcytidine-3'-phosphate
  modified_base 14: mod_base = OTHER; note = 2'-O-methylcytidine-3'-phosphate
  modified_base 15: mod_base = OTHER; note = 2'-O-methyladenosine-3'-phosphate
  modified_base 16: mod_base = OTHER; note = 2'-O-methyluridine-3'-phosphate
  modified_base 17: mod_base = OTHER; note = 2'-O-methylcytidine-3'-phosphate
  modified_base 18: mod_base = OTHER; note = 2'-O-methyluridine-3'-phosphate
  modified_base 19: mod_base = OTHER; note = 2'-O-methylguanosine-3'-phosphorothioate
  modified_base 20: mod_base = OTHER; note = 2'-O-methylguanosine-3'-phosphorothioate
  modified_base 21: mod_base = OTHER; note = 2'-O-methyladenosine
acccttccacttccatctgga

SEQ ID NO: 612 - RNA, 21 nt, synthetic construct
  source 1..21: mol_type = other RNA
  modified_base 1: mod_base = OTHER; note = 2'-O-methylcytidine-3'-phosphorothioate
  modified_base 2: mod_base = OTHER; note = 2'-O-methylcytidine-3'-phosphorothioate
  modified_base 3: mod_base = OTHER; note = 2'-O-methyladenosine-3'-phosphate
  modified_base 4: mod_base = OTHER; note = 2'-O-methyluridine-3'-phosphate
  modified_base 5: mod_base = OTHER; note = 2'-O-methyladenosine-3'-phosphate
  modified_base 6: mod_base = OTHER; note = 2'-O-hexadecyl-guanosine-3'-phosphate
  modified_base 7: mod_base = OTHER; note = 2'-deoxy-2'-fluorocytidine-3'-phosphate
  modified_base 8: mod_base = OTHER; note = 2'-O-methylcytidine-3'-phosphate
  modified_base 9: mod_base = OTHER; note = 2'-deoxy-2'-fluorocytidine-3'-phosphate
  modified_base 10: mod_base = OTHER; note = 2'-deoxy-2'-fluoroadenosine-3'-phosphate
  modified_base 11: mod_base = OTHER; note = 2'-deoxy-2'-fluorouridine-3'-phosphate
  modified_base 12: mod_base = OTHER; note = 2'-O-methylcytidine-3'-phosphate
  modified_base 13: mod_base = OTHER; note = 2'-O-methyladenosine-3'-phosphate
  modified_base 14: mod_base = OTHER; note = 2'-O-methyladenosine-3'-phosphate
  modified_base 15: mod_base = OTHER; note = 2'-O-methylguanosine-3'-phosphate
  modified_base 16: mod_base = OTHER; note = 2'-O-methylcytidine-3'-phosphate
  modified_base 17: mod_base = OTHER; note = 2'-O-methyluridine-3'-phosphate
  modified_base 18: mod_base = OTHER; note = 2'-O-methylcytidine-3'-phosphate
  modified_base 19: mod_base = OTHER; note = 2'-O-methylcytidine-3'-phosphorothioate
  modified_base 20: mod_base = OTHER; note = 2'-O-methyluridine-3'-phosphorothioate
  modified_base 21: mod_base = OTHER; note = 2'-O-methyladenosine
ccatagcccatcaagctccta

SEQ ID NO: 613 - RNA, 21 nt, synthetic construct
  source 1..21: mol_type = other RNA
  modified_base 1: mod_base = OTHER; note = 2'-O-methylguanosine-3'-phosphorothioate
  modified_base 2: mod_base = OTHER; note = 2'-O-methylcytidine-3'-phosphorothioate
  modified_base 3: mod_base = OTHER; note = 2'-O-methyladenosine-3'-phosphate
  modified_base 4: mod_base = OTHER; note = 2'-O-methylguanosine-3'-phosphate
  modified_base 5: mod_base = OTHER; note = 2'-O-methyladenosine-3'-phosphate
  modified_base 6: mod_base = OTHER; note = 2'-O-hexadecyl-guanosine-3'-phosphate
  modified_base 7: mod_base = OTHER; note = 2'-deoxy-2'-fluoroguanosine-3'-phosphate
  modified_base 8: mod_base = OTHER; note = 2'-O-methyluridine-3'-phosphate
  modified_base 9: mod_base = OTHER; note = 2'-deoxy-2'-fluoroadenosine-3'-phosphate
  modified_base 10: mod_base = OTHER; note = 2'-deoxy-2'-fluoroadenosine-3'-phosphate
  modified_base 11: mod_base = OTHER; note = 2'-deoxy-2'-fluoroadenosine-3'-phosphate
  modified_base 12: mod_base = OTHER; note = 2'-O-methyluridine-3'-phosphate
  modified_base 13: mod_base = OTHER; note = 2'-O-methylguanosine-3'-phosphate
  modified_base 14: mod_base = OTHER; note = 2'-O-methyladenosine-3'-phosphate
  modified_base 15: mod_base = OTHER; note = 2'-O-methylguanosine-3'-phosphate
  modified_base 16: mod_base = OTHER; note = 2'-O-methyluridine-3'-phosphate
  modified_base 17: mod_base = OTHER; note = 2'-O-methylcytidine-3'-phosphate
  modified_base 18: mod_base = OTHER; note = 2'-O-methylcytidine-3'-phosphate
  modified_base 19: mod_base = OTHER; note = 2'-O-methylcytidine-3'-phosphorothioate
  modified_base 20: mod_base = OTHER; note = 2'-O-methyluridine-3'-phosphorothioate
  modified_base 21: mod_base = OTHER; note = 2'-O-methyladenosine
gcagaggtaaatgagtcccta

SEQ ID NO: 614 - RNA, 21 nt, synthetic construct
  source 1..21: mol_type = other RNA
  modified_base 1: mod_base = OTHER; note = 2'-O-methylcytidine-3'-phosphorothioate
  modified_base 2: mod_base = OTHER; note = 2'-O-methylcytidine-3'-phosphorothioate
  modified_base 3: mod_base = OTHER; note = 2'-O-methylcytidine-3'-phosphate
  modified_base 4: mod_base = OTHER; note = 2'-O-methyladenosine-3'-phosphate
  modified_base 5: mod_base = OTHER; note = 2'-O-methyluridine-3'-phosphate
  modified_base 6: mod_base = OTHER; note = 2'-O-hexadecyl-cytidine-3'-phosphate
  modified_base 7: mod_base = OTHER; note = 2'-deoxy-2'-fluoroadenosine-3'-phosphate
  modified_base 8: mod_base = OTHER; note = 2'-O-methyladenosine-3'-phosphate
  modified_base 9: mod_base = OTHER; note = 2'-deoxy-2'-fluoroguanosine-3'-phosphate
  modified_base 10: mod_base = OTHER; note = 2'-deoxy-2'-fluorocytidine-3'-phosphate
  modified_base 11: mod_base = OTHER; note = 2'-deoxy-2'-fluorouridine-3'-phosphate
  modified_base 12: mod_base = OTHER; note = 2'-O-methylcytidine-3'-phosphate
  modified_base 13: mod_base = OTHER; note = 2'-O-methylcytidine-3'-phosphate
  modified_base 14: mod_base = OTHER; note = 2'-O-methyluridine-3'-phosphate
  modified_base 15: mod_base = OTHER; note = 2'-O-methylguanosine-3'-phosphate
  modified_base 16: mod_base = OTHER; note = 2'-O-methylcytidine-3'-phosphate
  modified_base 17: mod_base = OTHER; note = 2'-O-methylcytidine-3'-phosphate
  modified_base 18: mod_base = OTHER; note = 2'-O-methylcytidine-3'-phosphate
  modified_base 19: mod_base = OTHER; note = 2'-O-methyluridine-3'-phosphorothioate
  modified_base 20: mod_base = OTHER; note = 2'-O-methylguanosine-3'-phosphorothioate
  modified_base 21: mod_base = OTHER; note = 2'-O-methyladenosine
cccatcaagctcctgccctga

SEQ ID NO: 615 - RNA, 21 nt, synthetic construct
  source 1..21: mol_type = other RNA
  modified_base 1: mod_base = OTHER; note = 2'-O-methyluridine-3'-phosphorothioate
  modified_base 2: mod_base = OTHER; note = 2'-O-methylcytidine-3'-phosphorothioate
  modified_base 3: mod_base = OTHER; note = 2'-O-methylcytidine-3'-phosphate
  modified_base 4: mod_base = OTHER; note = 2'-O-methylcytidine-3'-phosphate
  modified_base 5: mod_base = OTHER; note = 2'-O-methyluridine-3'-phosphate
  modified_base 6: mod_base = OTHER; note = 2'-O-hexadecyl-cytidine-3'-phosphate
  modified_base 7: mod_base = OTHER; note = 2'-deoxy-2'-fluorocytidine-3'-phosphate
  modified_base 8: mod_base = OTHER; note = 2'-O-methylcytidine-3'-phosphate
  modified_base 9: mod_base = OTHER; note = 2'-deoxy-2'-fluorouridine-3'-phosphate
  modified_base 10: mod_base = OTHER; note = 2'-deoxy-2'-fluorocytidine-3'-phosphate
  modified_base 11: mod_base = OTHER; note = 2'-deoxy-2'-fluoroadenosine-3'-phosphate
  modified_base 12: mod_base = OTHER; note = 2'-O-methylcytidine-3'-phosphate
  modified_base 13: mod_base = OTHER; note = 2'-O-methylcytidine-3'-phosphate
  modified_base 14: mod_base = OTHER; note = 2'-O-methyladenosine-3'-phosphate
  modified_base 15: mod_base = OTHER; note = 2'-O-methylguanosine-3'-phosphate
  modified_base 16: mod_base = OTHER; note = 2'-O-methylcytidine-3'-phosphate
  modified_base 17: mod_base = OTHER; note = 2'-O-methylcytidine-3'-phosphate
  modified_base 18: mod_base = OTHER; note = 2'-O-methyluridine-3'-phosphate
  modified_base 19: mod_base = OTHER; note = 2'-O-methylcytidine-3'-phosphorothioate
  modified_base 20: mod_base = OTHER; note = 2'-O-methyladenosine-3'-phosphorothioate
  modified_base 21: mod_base = OTHER; note = 2'-O-methyladenosine
tccctccctcaccagcctcaa

SEQ ID NO: 616 - RNA, 21 nt, synthetic construct
  source 1..21: mol_type = other RNA
  modified_base 1: mod_base = OTHER; note = 2'-O-methylcytidine-3'-phosphorothioate
  modified_base 2: mod_base = OTHER; note = 2'-O-methyluridine-3'-phosphorothioate
  modified_base 3: mod_base = OTHER; note = 2'-O-methylguanosine-3'-phosphate
  modified_base 4: mod_base = OTHER; note = 2'-O-methyluridine-3'-phosphate
  modified_base 5: mod_base = OTHER; note = 2'-O-methylguanosine-3'-phosphate
  modified_base 6: mod_base = OTHER; note = 2'-O-hexadecyl-guanosine-3'-phosphate
  modified_base 7: mod_base = OTHER; note = 2'-deoxy-2'-fluorouridine-3'-phosphate
  modified_base 8: mod_base = OTHER; note = 2'-O-methylguanosine-3'-phosphate
  modified_base 9: mod_base = OTHER; note = 2'-deoxy-2'-fluoroguanosine-3'-phosphate
  modified_base 10: mod_base = OTHER; note = 2'-deoxy-2'-fluoroguanosine-3'-phosphate
  modified_base 11: mod_base = OTHER; note = 2'-deoxy-2'-fluorocytidine-3'-phosphate
  modified_base 12: mod_base = OTHER; note = 2'-O-methyluridine-3'-phosphate
  modified_base 13: mod_base = OTHER; note = 2'-O-methyluridine-3'-phosphate
  modified_base 14: mod_base = OTHER; note = 2'-O-methyluridine-3'-phosphate
  modified_base 15: mod_base = OTHER; note = 2'-O-methyluridine-3'-phosphate
  modified_base 16: mod_base = OTHER; note = 2'-O-methyluridine-3'-phosphate
  modified_base 17: mod_base = OTHER; note = 2'-O-methyladenosine-3'-phosphate
  modified_base 18: mod_base = OTHER; note = 2'-O-methyladenosine-3'-phosphate
  modified_base 19: mod_base = OTHER; note = 2'-O-methylguanosine-3'-phosphorothioate
  modified_base 20: mod_base = OTHER; note = 2'-O-methyladenosine-3'-phosphorothioate
  modified_base 21: mod_base = OTHER; note = 2'-O-methyladenosine
ctgtggtgggctttttaagaa

SEQ ID NO: 617 - RNA, 21 nt, synthetic construct
  source 1..21: mol_type = other RNA
  modified_base 1: mod_base = OTHER; note = 2'-O-methyluridine-3'-phosphorothioate
  modified_base 2: mod_base = OTHER; note = 2'-O-methylguanosine-3'-phosphorothioate
  modified_base 3: mod_base = OTHER; note = 2'-O-methylguanosine-3'-phosphate
  modified_base 4: mod_base = OTHER; note = 2'-O-methylguanosine-3'-phosphate
  modified_base 5: mod_base = OTHER; note = 2'-O-methylcytidine-3'-phosphate
  modified_base 6: mod_base = OTHER; note = 2'-O-hexadecyl-uridine-3'-phosphate
  modified_base 7: mod_base = OTHER; note = 2'-deoxy-2'-fluorouridine-3'-phosphate
  modified_base 8: mod_base = OTHER; note = 2'-O-methyluridine-3'-phosphate
  modified_base 9: mod_base = OTHER; note = 2'-deoxy-2'-fluorouridine-3'-phosphate
  modified_base 10: mod_base = OTHER; note = 2'-deoxy-2'-fluorouridine-3'-phosphate
  modified_base 11: mod_base = OTHER; note = 2'-deoxy-2'-fluoroadenosine-3'-phosphate
  modified_base 12: mod_base = OTHER; note = 2'-O-methyladenosine-3'-phosphate
  modified_base 13: mod_base = OTHER; note = 2'-O-methylguanosine-3'-phosphate
  modified_base 14: mod_base = OTHER; note = 2'-O-methyladenosine-3'-phosphate
  modified_base 15: mod_base = OTHER; note = 2'-O-methylguanosine-3'-phosphate
  modified_base 16: mod_base = OTHER; note = 2'-O-methylguanosine-3'-phosphate
  modified_base 17: mod_base = OTHER; note = 2'-O-methyladenosine-3'-phosphate
  modified_base 18: mod_base = OTHER; note = 2'-O-methyluridine-3'-phosphate
  modified_base 19: mod_base = OTHER; note = 2'-O-methyluridine-3'-phosphorothioate
  modified_base 20: mod_base = OTHER; note = 2'-O-methyluridine-3'-phosphorothioate
  modified_base 21: mod_base = OTHER; note = 2'-O-methyladenosine
tgggctttttaagaggattta

SEQ ID NO: 618 - RNA, 21 nt, synthetic construct
  source 1..21: mol_type = other RNA
  modified_base 1: mod_base = OTHER; note = 2'-O-methyluridine-3'-phosphorothioate
  modified_base 2: mod_base = OTHER; note = 2'-O-methyladenosine-3'-phosphorothioate
  modified_base 3: mod_base = OTHER; note = 2'-O-methyladenosine-3'-phosphate
  modified_base 4: mod_base = OTHER; note = 2'-O-methylguanosine-3'-phosphate
  modified_base 5: mod_base = OTHER; note = 2'-O-methyladenosine-3'-phosphate
  modified_base 6: mod_base = OTHER; note = 2'-O-hexadecyl-guanosine-3'-phosphate
  modified_base 7: mod_base = OTHER; note = 2'-deoxy-2'-fluoroguanosine-3'-phosphate
  modified_base 8: mod_base = OTHER; note = 2'-O-methyladenosine-3'-phosphate
  modified_base 9: mod_base = OTHER; note = 2'-deoxy-2'-fluorouridine-3'-phosphate
  modified_base 10: mod_base = OTHER; note = 2'-deoxy-2'-fluorouridine-3'-phosphate
  modified_base 11: mod_base = OTHER; note = 2'-deoxy-2'-fluorouridine-3'-phosphate
  modified_base 12: mod_base = OTHER; note = 2'-O-methyluridine-3'-phosphate
  modified_base 13: mod_base = OTHER; note = 2'-O-methyladenosine-3'-phosphate
  modified_base 14: mod_base = OTHER; note = 2'-O-methyladenosine-3'-phosphate
  modified_base 15: mod_base = OTHER; note = 2'-O-methylcytidine-3'-phosphate
  modified_base 16: mod_base = OTHER; note = 2'-O-methyluridine-3'-phosphate
  modified_base 17: mod_base = OTHER; note = 2'-O-methylguanosine-3'-phosphate
  modified_base 18: mod_base = OTHER; note = 2'-O-methylguanosine-3'-phosphate
  modified_base 19: mod_base = OTHER; note = 2'-O-methyluridine-3'-phosphorothioate
  modified_base 20: mod_base = OTHER; note = 2'-O-methyluridine-3'-phosphorothioate
  modified_base 21: mod_base = OTHER; note = 2'-O-methyladenosine
taagaggattttaactggtta

SEQ ID NO: 619 - RNA, 21 nt, synthetic construct
  source 1..21: mol_type = other RNA
  modified_base 1: mod_base = OTHER; note = 2'-O-methyladenosine-3'-phosphorothioate
  modified_base 2: mod_base = OTHER; note = 2'-O-methylguanosine-3'-phosphorothioate
  modified_base 3: mod_base = OTHER; note = 2'-O-methylguanosine-3'-phosphate
  modified_base 4: mod_base = OTHER; note = 2'-O-methylguanosine-3'-phosphate
  modified_base 5: mod_base = OTHER; note = 2'-O-methyladenosine-3'-phosphate
  modified_base 6: mod_base = OTHER; note = 2'-O-hexadecyl-adenosine-3'-phosphate
  modified_base 7: mod_base = OTHER; note = 2'-deoxy-2'-fluoroguanosine-3'-phosphate
  modified_base 8: mod_base = OTHER; note = 2'-O-methyladenosine-3'-phosphate
  modified_base 9: mod_base = OTHER; note = 2'-deoxy-2'-fluoroguanosine-3'-phosphate
  modified_base 10: mod_base = OTHER; note = 2'-deoxy-2'-fluoroadenosine-3'-phosphate
  modified_base 11: mod_base = OTHER; note = 2'-deoxy-2'-fluoroadenosine-3'-phosphate
  modified_base 12: mod_base = OTHER; note = 2'-O-methylguanosine-3'-phosphate
  modified_base 13: mod_base = OTHER; note = 2'-O-methylguanosine-3'-phosphate
  modified_base 14: mod_base = OTHER; note = 2'-O-methyladenosine-3'-phosphate
  modified_base 15: mod_base = OTHER; note = 2'-O-methylcytidine-3'-phosphate
  modified_base 16: mod_base = OTHER; note = 2'-O-methyladenosine-3'-phosphate
  modified_base 17: mod_base = OTHER; note = 2'-O-methylguanosine-3'-phosphate
  modified_base 18: mod_base = OTHER; note = 2'-O-methylguanosine-3'-phosphate
  modified_base 19: mod_base = OTHER; note = 2'-O-methylguanosine-3'-phosphorothioate
  modified_base 20: mod_base = OTHER; note = 2'-O-methyluridine-3'-phosphorothioate
  modified_base 21: mod_base = OTHER; note = 2'-O-methyladenosine
agggaagagaaggacagggta

SEQ ID NO: 620 - RNA, 21 nt, synthetic construct
  source 1..21: mol_type = other RNA
  modified_base 1: mod_base = OTHER; note = 2'-O-methylcytidine-3'-phosphorothioate
  modified_base 2: mod_base = OTHER; note = 2'-O-methylcytidine-3'-phosphorothioate
  modified_base 3: mod_base = OTHER; note = 2'-O-methyluridine-3'-phosphate
  modified_base 4: mod_base = OTHER; note = 2'-O-methylguanosine-3'-phosphate
  modified_base 5: mod_base = OTHER; note = 2'-O-methyluridine-3'-phosphate
  modified_base 6: mod_base = OTHER; note = 2'-O-hexadecyl-guanosine-3'-phosphate
  modified_base 7: mod_base = OTHER; note = 2'-deoxy-2'-fluorouridine-3'-phosphate
  modified_base 8: mod_base = OTHER; note = 2'-O-methylcytidine-3'-phosphate
  modified_base 9: mod_base = OTHER; note = 2'-deoxy-2'-fluorocytidine-3'-phosphate
  modified_base 10: mod_base = OTHER; note = 2'-deoxy-2'-fluorocytidine-3'-phosphate
  modified_base 11: mod_base = OTHER; note = 2'-deoxy-2'-fluorouridine-3'-phosphate
  modified_base 12: mod_base = OTHER; note = 2'-O-methyluridine-3'-phosphate
  modified_base 13: mod_base = OTHER; note = 2'-O-methylguanosine-3'-phosphate
  modified_base 14: mod_base = OTHER; note = 2'-O-methyluridine-3'-phosphate
  modified_base 15: mod_base = OTHER; note = 2'-O-methyladenosine-3'-phosphate
  modified_base 16: mod_base = OTHER; note = 2'-O-methyladenosine-3'-phosphate
  modified_base 17: mod_base = OTHER; note = 2'-O-methyladenosine-3'-phosphate
  modified_base 18: mod_base = OTHER; note = 2'-O-methyluridine-3'-phosphate
  modified_base 19: mod_base = OTHER; note = 2'-O-methyladenosine-3'-phosphorothioate
  modified_base 20: mod_base = OTHER; note = 2'-O-methylguanosine-3'-phosphorothioate
  modified_base 21: mod_base = OTHER; note = 2'-O-methyladenosine
cctgtgtcccttgtaaataga

SEQ ID NO: 621 - RNA, 21 nt, synthetic construct
  source 1..21: mol_type = other RNA
  modified_base 1: mod_base = OTHER; note = 2'-O-methyluridine-3'-phosphorothioate
  modified_base 2: mod_base = OTHER; note = 2'-O-methylcytidine-3'-phosphorothioate
  modified_base 3: mod_base = OTHER; note = 2'-O-methyluridine-3'-phosphate
  modified_base 4: mod_base = OTHER; note = 2'-O-methylcytidine-3'-phosphate
  modified_base 5: mod_base = OTHER; note = 2'-O-methylcytidine-3'-phosphate
  modified_base 6: mod_base = OTHER; note = 2'-O-hexadecyl-uridine-3'-phosphate
  modified_base 7: mod_base = OTHER; note = 2'-deoxy-2'-fluorocytidine-3'-phosphate
  modified_base 8: mod_base = OTHER; note = 2'-O-methyluridine-3'-phosphate
  modified_base 9: mod_base = OTHER; note = 2'-deoxy-2'-fluorouridine-3'-phosphate
  modified_base 10: mod_base = OTHER; note = 2'-deoxy-2'-fluorocytidine-3'-phosphate
  modified_base 11: mod_base = OTHER; note = 2'-deoxy-2'-fluorocytidine-3'-phosphate
  modified_base 12: mod_base = OTHER; note = 2'-O-methylcytidine-3'-phosphate
  modified_base 13: mod_base = OTHER; note = 2'-O-methyluridine-3'-phosphate
  modified_base 14: mod_base = OTHER; note = 2'-O-methyluridine-3'-phosphate
  modified_base 15: mod_base = OTHER; note = 2'-O-methylcytidine-3'-phosphate
  modified_base 16: mod_base = OTHER; note = 2'-O-methylcytidine-3'-phosphate
  modified_base 17: mod_base = OTHER; note = 2'-O-methylcytidine-3'-phosphate
  modified_base 18: mod_base = OTHER; note = 2'-O-methyluridine-3'-phosphate
  modified_base 19: mod_base = OTHER; note = 2'-O-methylguanosine-3'-phosphorothioate
  modified_base 20: mod_base = OTHER; note = 2'-O-methylguanosine-3'-phosphorothioate
  modified_base 21: mod_base = OTHER; note = 2'-O-methyladenosine
tctcctcttcccttccctgga

SEQ ID NO: 622 - RNA, 21 nt, synthetic construct
  source 1..21: mol_type = other RNA
  modified_base 1: mod_base = OTHER; note = 2'-O-methylcytidine-3'-phosphorothioate
  modified_base 2: mod_base = OTHER; note = 2'-O-methylguanosine-3'-phosphorothioate
  modified_base 3: mod_base = OTHER; note = 2'-O-methylguanosine-3'-phosphate
  modified_base 4: mod_base = OTHER; note = 2'-O-methylguanosine-3'-phosphate
  modified_base 5: mod_base = OTHER; note = 2'-O-methyluridine-3'-phosphate
  modified_base 6: mod_base = OTHER; note = 2'-O-hexadecyl-guanosine-3'-phosphate
  modified_base 7: mod_base = OTHER; note = 2'-deoxy-2'-fluorouridine-3'-phosphate
  modified_base 8: mod_base = OTHER; note = 2'-O-methyladenosine-3'-phosphate
  modified_base 9: mod_base = OTHER; note = 2'-deoxy-2'-fluoroadenosine-3'-phosphate
  modified_base 10: mod_base = OTHER; note = 2'-deoxy-2'-fluoroadenosine-3'-phosphate
  modified_base 11: mod_base = OTHER; note = 2'-deoxy-2'-fluorouridine-3'-phosphate
  modified_base 12: mod_base = OTHER; note = 2'-O-methyladenosine-3'-phosphate
  modified_base 13: mod_base = OTHER; note = 2'-O-methylguanosine-3'-phosphate
  modified_base 14: mod_base = OTHER; note = 2'-O-methyladenosine-3'-phosphate
  modified_base 15: mod_base = OTHER; note = 2'-O-methyluridine-3'-phosphate
  modified_base 16: mod_base = OTHER; note = 2'-O-methyluridine-3'-phosphate
  modified_base 17: mod_base = OTHER; note = 2'-O-methylguanosine-3'-phosphate
  modified_base 18: mod_base = OTHER; note = 2'-O-methyluridine-3'-phosphate
  modified_base 19: mod_base = OTHER; note = 2'-O-methyluridine-3'-phosphorothioate
  modified_base 20: mod_base = OTHER; note = 2'-O-methyladenosine-3'-phosphorothioate
  modified_base 21: mod_base = OTHER; note = 2'-O-methyladenosine
cgggtgtaaatagattgttaa

SEQ ID NO: 623 - RNA, 21 nt, synthetic construct
  source 1..21: mol_type = other RNA
  modified_base 1: mod_base = OTHER; note = 2'-O-methyluridine-3'-phosphorothioate
  modified_base 2: mod_base = OTHER; note = 2'-O-methyluridine-3'-phosphorothioate
  modified_base 3: mod_base = OTHER; note = 2'-O-methylguanosine-3'-phosphate
  modified_base 4: mod_base = OTHER; note = 2'-O-methyluridine-3'-phosphate
  modified_base 5: mod_base = OTHER; note = 2'-O-methyladenosine-3'-phosphate
  modified_base 6: mod_base = OTHER; note = 2'-O-hexadecyl-adenosine-3'-phosphate
  modified_base 7: mod_base = OTHER; note = 2'-deoxy-2'-fluoroadenosine-3'-phosphate
  modified_base 8: mod_base = OTHER; note = 2'-O-methyluridine-3'-phosphate
  modified_base 9: mod_base = OTHER; note = 2'-deoxy-2'-fluoroadenosine-3'-phosphate
  modified_base 10: mod_base = OTHER; note = 2'-deoxy-2'-fluoroguanosine-3'-phosphate
  modified_base 11: mod_base = OTHER; note = 2'-deoxy-2'-fluoroadenosine-3'-phosphate
  modified_base 12: mod_base = OTHER; note = 2'-O-methyladenosine-3'-phosphate
  modified_base 13: mod_base = OTHER; note = 2'-O-methylcytidine-3'-phosphate
  modified_base 14: mod_base = OTHER; note = 2'-O-methylcytidine-3'-phosphate
  modified_base 15: mod_base = OTHER; note = 2'-O-methyladenosine-3'-phosphate
  modified_base 16: mod_base = OTHER; note = 2'-O-methylguanosine-3'-phosphate
  modified_base 17: mod_base = OTHER; note = 2'-O-methylcytidine-3'-phosphate
  modified_base 18: mod_base = OTHER; note = 2'-O-methylcytidine-3'-phosphate
  modified_base 19: mod_base = OTHER; note = 2'-O-methylcytidine-3'-phosphorothioate
  modified_base 20: mod_base = OTHER; note = 2'-O-methyladenosine-3'-phosphorothioate
  modified_base 21: mod_base = OTHER; note = 2'-O-methyladenosine
ttgtaaatagaaccagcccaa

SEQ ID NO: 624 - RNA, 21 nt, synthetic construct
  source 1..21: mol_type = other RNA
  modified_base 1: mod_base = OTHER; note = 2'-O-methylcytidine-3'-phosphorothioate
  modified_base 2: mod_base = OTHER; note = 2'-O-methyluridine-3'-phosphorothioate
  modified_base 3: mod_base = OTHER; note = 2'-O-methyluridine-3'-phosphate
  modified_base 4: mod_base = OTHER; note = 2'-O-methyladenosine-3'-phosphate
  modified_base 5: mod_base = OTHER; note = 2'-O-methyladenosine-3'-phosphate
  modified_base 6: mod_base = OTHER; note = 2'-O-hexadecyl-adenosine-3'-phosphate
  modified_base 7: mod_base = OTHER; note = 2'-deoxy-2'-fluoroguanosine-3'-phosphate
  modified_base 8: mod_base = OTHER; note = 2'-O-methyladenosine-3'-phosphate
  modified_base 9: mod_base = OTHER; note = 2'-deoxy-2'-fluoroadenosine-3'-phosphate
  modified_base 10: mod_base = OTHER; note = 2'-deoxy-2'-fluoroadenosine-3'-phosphate
  modified_base 11: mod_base = OTHER; note = 2'-deoxy-2'-fluoroadenosine-3'-phosphate
  modified_base 12: mod_base = OTHER; note = 2'-O-methylcytidine-3'-phosphate
  modified_base 13: mod_base = OTHER; note = 2'-O-methylguanosine-3'-phosphate
  modified_base 14: mod_base = OTHER; note = 2'-O-methyluridine-3'-phosphate
  modified_base 15: mod_base = OTHER; note = 2'-O-methylcytidine-3'-phosphate
  modified_base 16: mod_base = OTHER; note = 2'-O-methylguanosine-3'-phosphate
  modified_base 17: mod_base = OTHER; note = 2'-O-methyladenosine-3'-phosphate
  modified_base 18: mod_base = OTHER; note = 2'-O-methyluridine-3'-phosphate
  modified_base 19: mod_base = OTHER; note = 2'-O-methyluridine-3'-phosphorothioate
  modified_base 20: mod_base = OTHER; note = 2'-O-methylcytidine-3'-phosphorothioate
  modified_base 21: mod_base = OTHER; note = 2'-O-methyladenosine
cttaaagaaaacgtcgattca

SEQ ID NO: 625 - RNA, 21 nt, synthetic construct
  source 1..21: mol_type = other RNA
  modified_base 1: mod_base = OTHER; note = 2'-O-methylguanosine-3'-phosphorothioate
  modified_base 2: mod_base = OTHER; note = 2'-O-methyladenosine-3'-phosphorothioate
  modified_base 3: mod_base = OTHER; note = 2'-O-methyladenosine-3'-phosphate
  modified_base 4: mod_base = OTHER; note = 2'-O-methyladenosine-3'-phosphate
  modified_base 5: mod_base = OTHER; note = 2'-O-methyladenosine-3'-phosphate
  modified_base 6: mod_base = OTHER; note = 2'-O-hexadecyl-cytidine-3'-phosphate
  modified_base 7: mod_base = OTHER; note = 2'-deoxy-2'-fluoroguanosine-3'-phosphate
  modified_base 8: mod_base = OTHER; note = 2'-O-methyluridine-3'-phosphate
  modified_base 9: mod_base = OTHER; note = 2'-deoxy-2'-fluorocytidine-3'-phosphate
  modified_base 10: mod_base = OTHER; note = 2'-deoxy-2'-fluoroguanosine-3'-phosphate
  modified_base 11: mod_base = OTHER; note = 2'-deoxy-2'-fluoroadenosine-3'-phosphate
  modified_base 12: mod_base = OTHER; note = 2'-O-methyluridine-3'-phosphate
  modified_base 13: mod_base = OTHER; note = 2'-O-methyluridine-3'-phosphate
  modified_base 14: mod_base = OTHER; note = 2'-O-methylcytidine-3'-phosphate
  modified_base 15: mod_base = OTHER; note = 2'-O-methylguanosine-3'-phosphate
  modified_base 16: mod_base = OTHER; note = 2'-O-methylcytidine-3'-phosphate
  modified_base 17: mod_base = OTHER; note = 2'-O-methyladenosine-3'-phosphate
  modified_base 18: mod_base = OTHER; note = 2'-O-methylcytidine-3'-phosphate
  modified_base 19: mod_base = OTHER; note = 2'-O-methylcytidine-3'-phosphorothioate
  modified_base 20: mod_base = OTHER; note = 2'-O-methylguanosine-3'-phosphorothioate
  modified_base 21: mod_base = OTHER; note = 2'-O-methyladenosine
gaaaacgtcgattcgcaccga

SEQ ID NO: 626 - RNA, 21 nt, synthetic construct
  source 1..21: mol_type = other RNA
  modified_base 1: mod_base = OTHER; note = 2'-O-methylguanosine-3'-phosphorothioate
  modified_base 2: mod_base = OTHER; note = 2'-O-methyluridine-3'-phosphorothioate
  modified_base 3: mod_base = OTHER; note = 2'-O-methylcytidine-3'-phosphate
  modified_base 4: mod_base = OTHER; note = 2'-O-methylguanosine-3'-phosphate
  modified_base 5: mod_base = OTHER; note = 2'-O-methyladenosine-3'-phosphate
  modified_base 6: mod_base = OTHER; note = 2'-O-hexadecyl-uridine-3'-phosphate
  modified_base 7: mod_base = OTHER; note = 2'-deoxy-2'-fluorouridine-3'-phosphate
  modified_base 8: mod_base = OTHER; note = 2'-O-methylcytidine-3'-phosphate
  modified_base 9: mod_base = OTHER; note = 2'-deoxy-2'-fluoroguanosine-3'-phosphate
  modified_base 10: mod_base = OTHER; note = 2'-deoxy-2'-fluorocytidine-3'-phosphate
  modified_base 11: mod_base = OTHER; note = 2'-deoxy-2'-fluoroadenosine-3'-phosphate
  modified_base 12: mod_base = OTHER; note = 2'-O-methylcytidine-3'-phosphate
  modified_base 13: mod_base = OTHER; note = 2'-O-methylcytidine-3'-phosphate
  modified_base 14: mod_base = OTHER; note = 2'-O-methylguanosine-3'-phosphate
  modified_base 15: mod_base = OTHER; note = 2'-O-methyluridine-3'-phosphate
  modified_base 16: mod_base = OTHER; note = 2'-O-methylcytidine-3'-phosphate
  modified_base 17: mod_base = OTHER; note = 2'-O-methylcytidine-3'-phosphate
  modified_base 18: mod_base = OTHER; note = 2'-O-methyladenosine-3'-phosphate
  modified_base 19: mod_base = OTHER; note = 2'-O-methyladenosine-3'-phosphorothioate
  modified_base 20: mod_base = OTHER; note = 2'-O-methylcytidine-3'-phosphorothioate
  modified_base 21: mod_base = OTHER; note = 2'-O-methyladenosine
gtcgattcgcaccgtccaaca

SEQ ID NO: 627 - RNA, 21 nt, synthetic construct
  source 1..21: mol_type = other RNA
  modified_base 1: mod_base = OTHER; note = 2'-O-methyluridine-3'-phosphorothioate
  modified_base 2: mod_base = OTHER; note = 2'-O-methylcytidine-3'-phosphorothioate
  modified_base 3: mod_base = OTHER; note = 2'-O-methylguanosine-3'-phosphate
  modified_base 4: mod_base = OTHER; note = 2'-O-methylcytidine-3'-phosphate
  modified_base 5: mod_base = OTHER; note = 2'-O-methyladenosine-3'-phosphate
  modified_base 6: mod_base = OTHER; note = 2'-O-hexadecyl-cytidine-3'-phosphate
  modified_base 7: mod_base = OTHER; note = 2'-deoxy-2'-fluorocytidine-3'-phosphate
  modified_base 8: mod_base = OTHER; note = 2'-O-methylguanosine-3'-phosphate
  modified_base 9: mod_base = OTHER; note = 2'-deoxy-2'-fluorouridine-3'-phosphate
  modified_base 10: mod_base = OTHER; note = 2'-deoxy-2'-fluorocytidine-3'-phosphate
  modified_base 11: mod_base = OTHER; note = 2'-deoxy-2'-fluorocytidine-3'-phosphate
  modified_base 12: mod_base = OTHER; note = 2'-O-methyladenosine-3'-phosphate
  modified_base 13: mod_base = OTHER; note = 2'-O-methyladenosine-3'-phosphate
  modified_base 14: mod_base = OTHER; note = 2'-O-methylcytidine-3'-phosphate
  modified_base 15: mod_base = OTHER; note = 2'-O-methylcytidine-3'-phosphate
  modified_base 16: mod_base = OTHER; note = 2'-O-methyluridine-3'-phosphate
  modified_base 17: mod_base = OTHER; note = 2'-O-methylguanosine-3'-phosphate
  modified_base 18: mod_base = OTHER; note = 2'-O-methylguanosine-3'-phosphate
  modified_base 19: mod_base = OTHER; note = 2'-O-methylcytidine-3'-phosphorothioate
  modified_base 20: mod_base = OTHER; note = 2'-O-methylcytidine-3'-phosphorothioate
  modified_base 21: mod_base = OTHER; note = 2'-O-methyladenosine
tcgcaccgtccaacctggcca

SEQ ID NO: 628 - RNA, 21 nt, synthetic construct
  source 1..21: mol_type = other RNA
  modified_base 1: mod_base = OTHER; note = 2'-O-methylcytidine-3'-phosphorothioate
  modified_base 2: mod_base = OTHER; note = 2'-O-methyladenosine-3'-phosphorothioate
  modified_base 3: mod_base = OTHER; note = 2'-O-methyladenosine-3'-phosphate
  modified_base 4: mod_base = OTHER; note = 2'-O-methylguanosine-3'-phosphate
  modified_base 5: mod_base = OTHER; note = 2'-O-methylguanosine-3'-phosphate
  modified_base 6: mod_base = OTHER; note = 2'-O-hexadecyl-uridine-3'-phosphate
  modified_base 7: mod_base = OTHER; note = 2'-deoxy-2'-fluorocytidine-3'-phosphate
  modified_base 8: mod_base = OTHER; note = 2'-O-methyluridine-3'-phosphate
  modified_base 9: mod_base = OTHER; note = 2'-deoxy-2'-fluoroadenosine-3'-phosphate
  modified_base 10: mod_base = OTHER; note = 2'-deoxy-2'-fluorocytidine-3'-phosphate
  modified_base 11: mod_base = OTHER; note = 2'-deoxy-2'-fluorouridine-3'-phosphate
  modified_base 12: mod_base = OTHER; note = 2'-O-methylcytidine-3'-phosphate
  modified_base 13: mod_base = OTHER; note = 2'-O-methylcytidine-3'-phosphate
  modified_base 14: mod_base = OTHER; note = 2'-O-methylcytidine-3'-phosphate
  modified_base 15: mod_base = OTHER; note = 2'-O-methyluridine-3'-phosphate
  modified_base 16: mod_base = OTHER; note = 2'-O-methylcytidine-3'-phosphate
  modified_base 17: mod_base = OTHER; note = 2'-O-methylcytidine-3'-phosphate
  modified_base 18: mod_base = OTHER; note = 2'-O-methyluridine-3'-phosphate
  modified_base 19: mod_base = OTHER; note = 2'-O-methylcytidine-3'-phosphorothioate
  modified_base 20: mod_base = OTHER; note = 2'-O-methyladenosine-3'-phosphorothioate
  modified_base 21: mod_base = OTHER; note = 2'-O-methyladenosine
caaggtctactccctcctcaa

SEQ ID NO: 629 - RNA, 21 nt, synthetic construct
  source 1..21: mol_type = other RNA
  modified_base 1: mod_base = OTHER; note = 2'-O-methylguanosine-3'-phosphorothioate
  modified_base 2: mod_base = OTHER; note = 2'-O-methylcytidine-3'-phosphorothioate
  modified_base 3: mod_base = OTHER; note = 2'-O-methyluridine-3'-phosphate
  modified_base 4: mod_base = OTHER; note = 2'-O-methylcytidine-3'-phosphate
  modified_base 5: mod_base = OTHER; note = 2'-O-methylcytidine-3'-phosphate
  modified_base 6: mod_base = OTHER; note = 2'-O-hexadecyl-uridine-3'-phosphate
  modified_base 7: mod_base = OTHER; note = 2'-deoxy-2'-fluoroguanosine-3'-phosphate
  modified_base 8: mod_base = OTHER; note = 2'-O-methyladenosine-3'-phosphate
  modified_base 9: mod_base = OTHER; note = 2'-deoxy-2'-fluorouridine-3'-phosphate
  modified_base 10: mod_base = OTHER; note = 2'-deoxy-2'-fluoroguanosine-3'-phosphate
  modified_base 11: mod_base = OTHER; note = 2'-deoxy-2'-fluorouridine-3'-phosphate
  modified_base 12: mod_base = OTHER; note = 2'-O-methylcytidine-3'-phosphate
  modified_base 13: mod_base = OTHER; note = 2'-O-methyluridine-3'-phosphate
  modified_base 14: mod_base = OTHER; note = 2'-O-methyluridine-3'-phosphate
  modified_base 15: mod_base = OTHER; note = 2'-O-methyladenosine-3'-phosphate
  modified_base 16: mod_base = OTHER; note = 2'-O-methylguanosine-3'-phosphate
  modified_base 17: mod_base = OTHER; note = 2'-O-methyluridine-3'-phosphate
  modified_base 18: mod_base = OTHER; note = 2'-O-methyluridine-3'-phosphate
  modified_base 19: mod_base = OTHER; note = 2'-O-methyluridine-3'-phosphorothioate
  modified_base 20: mod_base = OTHER; note = 2'-O-methylcytidine-3'-phosphorothioate
  modified_base 21: mod_base = OTHER; note = 2'-O-methyladenosine
gctcctgatgtcttagtttca

SEQ ID NO: 630 - RNA, 21 nt, synthetic construct
  source 1..21: mol_type = other RNA
  modified_base 1: mod_base = OTHER; note = 2'-O-methyladenosine-3'-phosphorothioate
  modified_base 2: mod_base = OTHER; note = 2'-O-methyluridine-3'-phosphorothioate
  modified_base 3: mod_base = OTHER; note = 2'-O-methylguanosine-3'-phosphate
  modified_base 4: mod_base = OTHER; note = 2'-O-methyluridine-3'-phosphate
  modified_base 5: mod_base = OTHER; note = 2'-O-methylcytidine-3'-phosphate
  modified_base 6: mod_base = OTHER; note = 2'-O-hexadecyl-uridine-3'-phosphate
  modified_base 7: mod_base = OTHER; note = 2'-deoxy-2'-fluorouridine-3'-phosphate
  modified_base 8: mod_base = OTHER; note = 2'-O-methyladenosine-3'-phosphate
  modified_base 9: mod_base = OTHER; note = 2'-deoxy-2'-fluoroguanosine-3'-phosphate
  modified_base 10: mod_base = OTHER; note = 2'-deoxy-2'-fluorouridine-3'-phosphate
  modified_base 11: mod_base = OTHER; note = 2'-deoxy-2'-fluorouridine-3'-phosphate
  modified_base 12: mod_base = OTHER; note = 2'-O-methyluridine-3'-phosphate
  modified_base 13: mod_base = OTHER; note = 2'-O-methylcytidine-3'-phosphate
  modified_base 14: mod_base = OTHER; note = 2'-O-methylcytidine-3'-phosphate
  modified_base 15: mod_base = OTHER; note = 2'-O-methyladenosine-3'-phosphate
  modified_base 16: mod_base = OTHER; note = 2'-O-methylcytidine-3'-phosphate
  modified_base 17: mod_base = OTHER; note = 2'-O-methyladenosine-3'-phosphate
  modified_base 18: mod_base = OTHER; note = 2'-O-methylguanosine-3'-phosphate
  modified_base 19: mod_base = OTHER; note = 2'-O-methyluridine-3'-phosphorothioate
  modified_base 20: mod_base = OTHER; note = 2'-O-methyladenosine-3'-phosphorothioate
  modified_base 21: mod_base = OTHER; note = 2'-O-methyladenosine
atgtcttagtttccacagtaa

SEQ ID NO: 631 - RNA, 21 nt, synthetic construct
  source 1..21: mol_type = other RNA
  modified_base 1: mod_base = OTHER; note = 2'-O-methylcytidine-3'-phosphorothioate
  modified_base 2: mod_base = OTHER; note = 2'-O-methylcytidine-3'-phosphorothioate
  modified_base 3: mod_base = OTHER; note = 2'-O-methyluridine-3'-phosphate
  modified_base 4: mod_base = OTHER; note = 2'-O-methylguanosine-3'-phosphate
  modified_base 5: mod_base = OTHER; note = 2'-O-methyluridine-3'-phosphate
  modified_base 6: mod_base = OTHER; note = 2'-O-hexadecyl-guanosine-3'-phosphate
  modified_base 7: mod_base = OTHER; note = 2'-deoxy-2'-fluorouridine-3'-phosphate
  modified_base 8: mod_base = OTHER; note = 2'-O-methyladenosine-3'-phosphate
  modified_base 9: mod_base = OTHER; note = 2'-deoxy-2'-fluorocytidine-3'-phosphate
  modified_base 10: mod_base = OTHER; note = 2'-deoxy-2'-fluoroadenosine-3'-phosphate
  modified_base 11: mod_base = OTHER; note = 2'-deoxy-2'-fluoroguanosine-3'-phosphate
  modified_base 12: mod_base = OTHER; note = 2'-O-methyladenosine-3'-phosphate
  modified_base 13: mod_base = OTHER; note = 2'-O-methylcytidine-3'-phosphate
  modified_base 14: mod_base = OTHER; note = 2'-O-methylcytidine-3'-phosphate
  modified_base 15: mod_base = OTHER; note = 2'-O-methyluridine-3'-phosphate
  modified_base 16: mod_base = OTHER; note = 2'-O-methylcytidine-3'-phosphate
  modified_base 17: mod_base = OTHER; note = 2'-O-methylcytidine-3'-phosphate
  modified_base 18: mod_base = OTHER; note = 2'-O-methylguanosine-3'-phosphate
  modified_base 19: mod_base = OTHER; note = 2'-O-methyluridine-3'-phosphorothioate
  modified_base 20: mod_base = OTHER; note = 2'-O-methyluridine-3'-phosphorothioate
  modified_base 21: mod_base = OTHER; note = 2'-O-methyladenosine
cctgtgtacagacctccgtta

SEQ ID NO: 632 - RNA, 21 nt, synthetic construct
  source 1..21: mol_type = other RNA
  modified_base 1: mod_base = OTHER; note = 2'-O-methyladenosine-3'-phosphorothioate
  modified_base 2: mod_base = OTHER; note = 2'-O-methylcytidine-3'-phosphorothioate
  modified_base 3: mod_base = OTHER; note = 2'-O-methyladenosine-3'-phosphate
  modified_base 4: mod_base = OTHER; note = 2'-O-methylguanosine-3'-phosphate
  modified_base 5: mod_base = OTHER; note = 2'-O-methyladenosine-3'-phosphate
  modified_base 6: mod_base = OTHER; note = 2'-O-hexadecyl-cytidine-3'-phosphate
  modified_base 7: mod_base = OTHER; note = 2'-deoxy-2'-fluorocytidine-3'-phosphate
  modified_base 8: mod_base = OTHER; note = 2'-O-methyluridine-3'-phosphate
  modified_base 9: mod_base = OTHER; note = 2'-deoxy-2'-fluorocytidine-3'-phosphate
  modified_base 10: mod_base = OTHER; note = 2'-deoxy-2'-fluorocytidine-3'-phosphate
  modified_base 11: mod_base = OTHER; note = 2'-deoxy-2'-fluoroguanosine-3'-phosphate
  modified_base 12: mod_base = OTHER; note = 2'-O-methyluridine-3'-phosphate
  modified_base 13: mod_base = OTHER; note = 2'-O-methyluridine-3'-phosphate
  modified_base 14: mod_base = OTHER; note = 2'-O-methylcytidine-3'-phosphate
  modified_base 15: mod_base = OTHER; note = 2'-O-methyladenosine-3'-phosphate
  modified_base 16: mod_base = OTHER; note = 2'-O-methyladenosine-3'-phosphate
  modified_base 17: mod_base = OTHER; note = 2'-O-methyluridine-3'-phosphate
  modified_base 18: mod_base = OTHER; note = 2'-O-methyladenosine-3'-phosphate
  modified_base 19: mod_base = OTHER; note = 2'-O-methyladenosine-3'-phosphorothioate
  modified_base 20: mod_base = OTHER; note = 2'-O-methyladenosine-3'-phosphorothioate
  modified_base 21: mod_base = OTHER; note = 2'-O-methyladenosine
acagacctccgttcaataaaa

SEQ ID NO: 633 - RNA, 21 nt, synthetic construct
  source 1..21: mol_type = other RNA
  modified_base 1: mod_base = OTHER; note = 2'-O-methylcytidine-3'-phosphorothioate
  modified_base 2: mod_base = OTHER; note = 2'-O-methyluridine-3'-phosphorothioate
  modified_base 3: mod_base = OTHER; note = 2'-O-methylcytidine-3'-phosphate
  modified_base 4: mod_base = OTHER; note = 2'-O-methylcytidine-3'-phosphate
  modified_base 5: mod_base = OTHER; note = 2'-O-methylguanosine-3'-phosphate
  modified_base 6: mod_base = OTHER; note = 2'-O-hexadecyl-uridine-3'-phosphate
  modified_base 7: mod_base = OTHER; note = 2'-deoxy-2'-fluorouridine-3'-phosphate
  modified_base 8: mod_base = OTHER; note = 2'-O-methylcytidine-3'-phosphate
  modified_base 9: mod_base = OTHER; note = 2'-deoxy-2'-fluoroadenosine-3'-phosphate
  modified_base 10: mod_base = OTHER; note = 2'-deoxy-2'-fluoroadenosine-3'-phosphate
  modified_base 11: mod_base = OTHER; note = 2'-deoxy-2'-fluorouridine-3'-phosphate
  modified_base 12: mod_base = OTHER; note = 2'-O-methyladenosine-3'-phosphate
  modified_base 13: mod_base = OTHER; note = 2'-O-methyladenosine-3'-phosphate
  modified_base 14: mod_base = OTHER; note = 2'-O-methyladenosine-3'-phosphate
  modified_base 15: mod_base = OTHER; note = 2'-O-methyluridine-3'-phosphate
  modified_base 16: mod_base = OTHER; note = 2'-O-methyluridine-3'-phosphate
  modified_base 17: mod_base = OTHER; note = 2'-O-methyladenosine-3'-phosphate
  modified_base 18: mod_base = OTHER; note = 2'-O-methyluridine-3'-phosphate
  modified_base 19: mod_base = OTHER; note = 2'-O-methyluridine-3'-phosphorothioate
  modified_base 20: mod_base = OTHER; note = 2'-O-methylguanosine-3'-phosphorothioate
  modified_base 21: mod_base = OTHER; note = 2'-O-methyladenosine
ctccgttcaataaattattga

SEQ ID NO: 634 - RNA, 21 nt, synthetic construct
  source 1..21: mol_type = other RNA
  modified_base 1: mod_base = OTHER; note = 2'-O-methyluridine-3'-phosphorothioate
  modified_base 2: mod_base = OTHER; note = 2'-O-methyladenosine-3'-phosphorothioate
  modified_base 3: mod_base = OTHER; note = 2'-O-methylguanosine-3'-phosphate
  modified_base 4: mod_base = OTHER; note = 2'-O-methyluridine-3'-phosphate
  modified_base 5: mod_base = OTHER; note = 2'-O-methyluridine-3'-phosphate
  modified_base 6: mod_base = OTHER; note = 2'-O-hexadecyl-uridine-3'-phosphate
  modified_base 7: mod_base = OTHER; note = 2'-deoxy-2'-fluorocytidine-3'-phosphate
  modified_base 8: mod_base = OTHER; note = 2'-O-methylcytidine-3'-phosphate
  modified_base 9: mod_base = OTHER; note = 2'-deoxy-2'-fluoroadenosine-3'-phosphate
  modified_base 10: mod_base = OTHER; note = 2'-deoxy-2'-fluorocytidine-3'-phosphate
  modified_base 11: mod_base = OTHER; note = 2'-deoxy-2'-fluoroadenosine-3'-phosphate
  modified_base 12: mod_base = OTHER; note = 2'-O-methylguanosine-3'-phosphate
  modified_base 13: mod_base = OTHER; note = 2'-O-methyluridine-3'-phosphate
  modified_base 14: mod_base = OTHER; note = 2'-O-methyladenosine-3'-phosphate
  modified_base 15: mod_base = OTHER; note = 2'-O-methyladenosine-3'-phosphate
  modified_base 16: mod_base = OTHER; note = 2'-O-methylguanosine-3'-phosphate
  modified_base 17: mod_base = OTHER; note = 2'-O-methylguanosine-3'-phosphate
  modified_base 18: mod_base = OTHER; note = 2'-O-methyluridine-3'-phosphate
  modified_base 19: mod_base = OTHER; note = 2'-O-methyluridine-3'-phosphorothioate
  modified_base 20: mod_base = OTHER; note = 2'-O-methyluridine-3'-phosphorothioate
  modified_base 21: mod_base = OTHER; note = 2'-O-methyladenosine
tagtttccacagtaaggttta

SEQ ID NO: 635 - RNA, 21 nt, synthetic construct
  source 1..21: mol_type = other RNA
  modified_base 1: mod_base = OTHER; note = 2'-O-methylcytidine-3'-phosphorothioate
  modified_base 2: mod_base = OTHER; note = 2'-O-methylcytidine-3'-phosphorothioate
  modified_base 3: mod_base = OTHER; note = 2'-O-methyladenosine-3'-phosphate
  modified_base 4: mod_base = OTHER; note = 2'-O-methylcytidine-3'-phosphate
  modified_base 5: mod_base = OTHER; note = 2'-O-methyladenosine-3'-phosphate
  modified_base 6: mod_base = OTHER; note = 2'-O-hexadecyl-guanosine-3'-phosphate
  modified_base 7: mod_base = OTHER; note = 2'-deoxy-2'-fluorouridine-3'-phosphate
  modified_base 8: mod_base = OTHER; note = 2'-O-methyladenosine-3'-phosphate
  modified_base 9: mod_base = OTHER; note = 2'-deoxy-2'-fluoroadenosine-3'-phosphate
  modified_base 10: mod_base = OTHER; note = 2'-deoxy-2'-fluoroguanosine-3'-phosphate
  modified_base 11: mod_base = OTHER; note = 2'-deoxy-2'-fluoroguanosine-3'-phosphate
  modified_base 12: mod_base = OTHER; note = 2'-O-methyluridine-3'-phosphate
  modified_base 13: mod_base = OTHER; note = 2'-O-methyluridine-3'-phosphate
  modified_base 14: mod_base = OTHER; note = 2'-O-methyluridine-3'-phosphate
  modified_base 15: mod_base = OTHER; note = 2'-O-methylguanosine-3'-phosphate
  modified_base 16: mod_base = OTHER; note = 2'-O-methylcytidine-3'-phosphate
  modified_base 17: mod_base = OTHER; note = 2'-O-methylcytidine-3'-phosphate
  modified_base 18: mod_base = OTHER; note = 2'-O-methyluridine-3'-phosphate
  modified_base 19: mod_base = OTHER; note = 2'-O-methylguanosine-3'-phosphorothioate
  modified_base 20: mod_base = OTHER; note = 2'-O-methyluridine-3'-phosphorothioate
  modified_base 21: mod_base = OTHER; note = 2'-O-methyladenosine
ccacagtaaggtttgcctgta

SEQ ID NO: 636 - RNA, 21 nt, synthetic construct
  source 1..21: mol_type = other RNA
  modified_base 1: mod_base = OTHER; note = 2'-O-methyladenosine-3'-phosphorothioate
  modified_base 2: mod_base = OTHER; note = 2'-O-methyladenosine-3'-phosphorothioate
  modified_base 3: mod_base = OTHER; note = 2'-O-methylguanosine-3'-phosphate
  modified_base 4: mod_base = OTHER; note = 2'-O-methylguanosine-3'-phosphate
  modified_base 5: mod_base = OTHER; note = 2'-O-methyluridine-3'-phosphate
  modified_base 6: mod_base = OTHER; note = 2'-O-hexadecyl-uridine-3'-phosphate
  modified_base 7: mod_base = OTHER; note = 2'-deoxy-2'-fluorouridine-3'-phosphate
  modified_base 8: mod_base = OTHER; note = 2'-O-methylguanosine-3'-phosphate
  modified_base 9: mod_base = OTHER; note = 2'-deoxy-2'-fluorocytidine-3'-phosphate
  modified_base 10: mod_base = OTHER; note = 2'-deoxy-2'-fluorocytidine-3'-phosphate
  modified_base 11: mod_base = OTHER; note = 2'-deoxy-2'-fluorouridine-3'-phosphate
  modified_base 12: mod_base = OTHER; note = 2'-O-methylguanosine-3'-phosphate
  modified_base 13: mod_base = OTHER; note = 2'-O-methyluridine-3'-phosphate
  modified_base 14: mod_base = OTHER; note = 2'-O-methylguanosine-3'-phosphate
  modified_base 15: mod_base = OTHER; note = 2'-O-methyluridine-3'-phosphate
  modified_base 16: mod_base = OTHER; note = 2'-O-methyladenosine-3'-phosphate
  modified_base 17: mod_base = OTHER; note = 2'-O-methylcytidine-3'-phosphate
  modified_base 18: mod_base = OTHER; note = 2'-O-methyladenosine-3'-phosphate
  modified_base 19: mod_base = OTHER; note = 2'-O-methylguanosine-3'-phosphorothioate
  modified_base 20: mod_base = OTHER; note = 2'-O-methyladenosine-3'-phosphorothioate
  modified_base 21: mod_base = OTHER; note = 2'-O-methyladenosine
aaggtttgcctgtgtacagaa

SEQ ID NO: 637 - RNA, 21 nt, synthetic construct
  source 1..21: mol_type = other RNA
  modified_base 1: mod_base = OTHER; note = 2'-O-methyluridine-3'-phosphorothioate
  modified_base 2: mod_base = OTHER; note = 2'-O-methylcytidine-3'-phosphorothioate
  modified_base 3: mod_base = OTHER; note = 2'-O-methyladenosine-3'-phosphate
  modified_base 4: mod_base = OTHER; note = 2'-O-methyladenosine-3'-phosphate
  modified_base 5: mod_base = OTHER; note = 2'-O-methyluridine-3'-phosphate
  modified_base 6: mod_base = OTHER; note = 2'-O-hexadecyl-adenosine-3'-phosphate
  modified_base 7: mod_base = OTHER; note = 2'-deoxy-2'-fluoroadenosine-3'-phosphate
  modified_base 8: mod_base = OTHER; note = 2'-O-methyladenosine-3'-phosphate
  modified_base 9: mod_base = OTHER; note = 2'-deoxy-2'-fluorouridine-3'-phosphate
  modified_base 10: mod_base = OTHER; note = 2'-deoxy-2'-fluorouridine-3'-phosphate
  modified_base 11: mod_base = OTHER; note = 2'-deoxy-2'-fluoroadenosine-3'-phosphate
  modified_base 12: mod_base = OTHER; note = 2'-O-methyluridine-3'-phosphate
  modified_base 13: mod_base = OTHER; note = 2'-O-methyluridine-3'-phosphate
  modified_base 14: mod_base = OTHER; note = 2'-O-methylguanosine-3'-phosphate
  modified_base 15: mod_base = OTHER; note = 2'-O-methylguanosine-3'-phosphate
  modified_base 16: mod_base = OTHER; note = 2'-O-methylcytidine-3'-phosphate
  modified_base 17: mod_base = OTHER; note = 2'-O-methyladenosine-3'-phosphate
  modified_base 18: mod_base = OTHER; note = 2'-O-methyluridine-3'-phosphate
  modified_base 19: mod_base = OTHER; note = 2'-O-methylguanosine-3'-phosphorothioate
  modified_base 20: mod_base = OTHER; note = 2'-O-methyladenosine-3'-phosphorothioate
  modified_base 21: mod_base = OTHER; note = 2'-O-methyladenosine
tcaataaattattggcatgaa

SEQ ID NO: 638 - RNA, 23 nt, synthetic construct
  source 1..23: mol_type = other RNA
  modified_base 1: mod_base = OTHER; note = 2'-O-methyluridine-3'-phosphorothioate 5'-(E)-Vinylphosphonate
  modified_base 2: mod_base = OTHER; note = 2'-deoxy-2'-fluoroguanosine-3'-phosphorothioate
  modified_base 3: mod_base = OTHER; note = 2'-O-methylcytidine-3'-phosphate
  modified_base 4: mod_base = OTHER; note = 2'-O-methyluridine-3'-phosphate
  modified_base 5: mod_base = OTHER; note = 2'-O-methyladenosine-3'-phosphate
  modified_base 6: mod_base = OTHER; note = 2'-deoxy-2'-fluorocytidine-3'-phosphate
  modified_base 7: mod_base = OTHER; note = 2'-O-methylguanosine-3'-phosphate
  modified_base 8: mod_base = OTHER; note = 2'-deoxy-2'-fluoroadenosine-3'-phosphate
  modified_base 9: mod_base = OTHER; note = 2'-deoxy-2'-fluorocytidine-3'-phosphate
  modified_base 10: mod_base = OTHER; note = 2'-O-methyluridine-3'-phosphate
  modified_base 11: mod_base = OTHER; note = 2'-O-methylguanosine-3'-phosphate
  modified_base 12: mod_base = OTHER; note = 2'-O-methyluridine-3'-phosphate
  modified_base 13: mod_base = OTHER; note = 2'-O-methylguanosine-3'-phosphate
  modified_base 14: mod_base = OTHER; note = 2'-deoxy-2'-fluoroguanosine-3'-phosphate
  modified_base 15: mod_base = OTHER; note = 2'-O-methyluridine-3'-phosphate
  modified_base 16: mod_base = OTHER; note = 2'-deoxy-2'-fluorocytidine-3'-phosphate
  modified_base 17: mod_base = OTHER; note = 2'-O-methyladenosine-3'-phosphate
  modified_base 18: mod_base = OTHER; note = 2'-O-methylcytidine-3'-phosphate
  modified_base 19: mod_base = OTHER; note = 2'-O-methylcytidine-3'-phosphate
  modified_base 20: mod_base = OTHER; note = 2'-O-methyluridine-3'-phosphate
  modified_base 21: mod_base = OTHER; note = 2'-O-methyluridine-3'-phosphorothioate
  modified_base 22: mod_base = OTHER; note = 2'-O-methylcytidine-3'-phosphorothioate
  modified_base 23: mod_base = OTHER; note = 2'-O-methylcytidine
tgctacgactgtggtcaccttcc

SEQ ID NO: 639 - RNA, 23 nt, synthetic construct
  source 1..23: mol_type = other RNA
  modified_base 1: mod_base = OTHER; note = 2'-O-methyluridine-3'-phosphorothioate 5'-(E)-Vinylphosphonate
  modified_base 2: mod_base = OTHER; note = 2'-deoxy-2'-fluoroadenosine-3'-phosphorothioate
  modified_base 3: mod_base = OTHER; note = 2'-O-methylguanosine-3'-phosphate
  modified_base 4: mod_base = OTHER; note = 2'-O-methyladenosine-3'-phosphate
  modified_base 5: mod_base = OTHER; note = 2'-O-methylguanosine-3'-phosphate
  modified_base 6: mod_base = OTHER; note = 2'-deoxy-2'-fluorouridine-3'-phosphate
  modified_base 7: mod_base = OTHER; note = 2'-O-methylguanosine-3'-phosphate
  modified_base 8: mod_base = OTHER; note = 2'-deoxy-2'-fluoroguanosine-3'-phosphate
  modified_base 9: mod_base = OTHER; note = 2'-deoxy-2'-fluorocytidine-3'-phosphate
  modified_base 10: mod_base = OTHER; note = 2'-O-methyluridine-3'-phosphate
  modified_base 11: mod_base = OTHER; note = 2'-O-methyladenosine-3'-phosphate
  modified_base 12: mod_base = OTHER; note = 2'-O-methylcytidine-3'-phosphate
  modified_base 13: mod_base = OTHER; note = 2'-O-methylguanosine-3'-phosphate
  modified_base 14: mod_base = OTHER; note = 2'-deoxy-2'-fluoroadenosine-3'-phosphate
  modified_base 15: mod_base = OTHER; note = 2'-O-methylcytidine-3'-phosphate
  modified_base 16: mod_base = OTHER; note = 2'-deoxy-2'-fluorouridine-3'-phosphate
  modified_base 17: mod_base = OTHER; note = 2'-O-methylguanosine-3'-phosphate
  modified_base 18: mod_base = OTHER; note = 2'-O-methyluridine-3'-phosphate
  modified_base 19: mod_base = OTHER; note = 2'-O-methylguanosine-3'-phosphate
  modified_base 20: mod_base = OTHER; note = 2'-O-methylguanosine-3'-phosphate
  modified_base 21: mod_base = OTHER; note = 2'-O-methyluridine-3'-phosphorothioate
  modified_base 22: mod_base = OTHER; note = 2'-O-methylcytidine-3'-phosphorothioate
  modified_base 23: mod_base = OTHER; note = 2'-O-methyladenosine
tagagtggctacgactgtggtca

SEQ ID NO: 640 - RNA, 23 nt, synthetic construct
  source 1..23: mol_type = other RNA
  modified_base 1: mod_base = OTHER; note = 2'-O-methyluridine-3'-phosphorothioate 5'-(E)-Vinylphosphonate
  modified_base 2: mod_base = OTHER; note = 2'-deoxy-2'-fluorouridine-3'-phosphorothioate
  modified_base 3: mod_base = OTHER; note = 2'-O-methyluridine-3'-phosphate
  modified_base 4: mod_base = OTHER; note = 2'-O-methylguanosine-3'-phosphate
  modified_base 5: mod_base = OTHER; note = 2'-O-methylguanosine-3'-phosphate
  modified_base 6: mod_base = OTHER; note = 2'-deoxy-2'-fluorocytidine-3'-phosphate
  modified_base 7: mod_base = OTHER; note = 2'-O-methylcytidine-3'-phosphate
  modified_base 8: mod_base = OTHER; note = 2'-deoxy-2'-fluorouridine-3'-phosphate
  modified_base 9: mod_base = OTHER; note = 2'-deoxy-2'-fluoroadenosine-3'-phosphate
  modified_base 10: mod_base = OTHER; note = 2'-O-methylguanosine-3'-phosphate
  modified_base 11: mod_base = OTHER; note = 2'-O-methyladenosine-3'-phosphate
  modified_base 12: mod_base = OTHER; note = 2'-O-methylguanosine-3'-phosphate
  modified_base 13: mod_base = OTHER; note = 2'-O-methyluridine-3'-phosphate
  modified_base 14: mod_base = OTHER; note = 2'-deoxy-2'-fluoroguanosine-3'-phosphate
  modified_base 15: mod_base = OTHER; note = 2'-O-methylguanosine-3'-phosphate
  modified_base 16: mod_base = OTHER; note = 2'-deoxy-2'-fluorocytidine-3'-phosphate
  modified_base 17: mod_base = OTHER; note = 2'-O-methyluridine-3'-phosphate
  modified_base 18: mod_base = OTHER; note = 2'-O-methyladenosine-3'-phosphate
  modified_base 19: mod_base = OTHER; note = 2'-O-methylcytidine-3'-phosphate
  modified_base 20: mod_base = OTHER; note = 2'-O-methylguanosine-3'-phosphate
  modified_base 21: mod_base = OTHER; note = 2'-O-methyladenosine-3'-phosphorothioate
  modified_base 22: mod_base = OTHER; note = 2'-O-methylcytidine-3'-phosphorothioate
  modified_base 23: mod_base = OTHER; note = 2'-O-methyluridine
tttggcctagagtggctacgact

SEQ ID NO: 641 - RNA, 23 nt, synthetic construct
  source 1..23: mol_type = other RNA
  modified_base 1: mod_base = OTHER; note = 2'-O-methyluridine-3'-phosphorothioate 5'-(E)-Vinylphosphonate
  modified_base 2: mod_base = OTHER; note = 2'-deoxy-2'-fluoroadenosine-3'-phosphorothioate
  modified_base 3: mod_base = OTHER; note = 2'-O-methylguanosine-3'-phosphate
  modified_base 4: mod_base = OTHER; note = 2'-O-methylcytidine-3'-phosphate
  modified_base 5: mod_base = OTHER; note = 2'-O-methylcytidine-3'-phosphate
  modified_base 6: mod_base = OTHER; note = 2'-deoxy-2'-fluoroadenosine-3'-phosphate
  modified_base 7: mod_base = OTHER; note = 2'-O-methylcytidine-3'-phosphate
  modified_base 8: mod_base = OTHER; note = 2'-deoxy-2'-fluorouridine-3'-phosphate
  modified_base 9: mod_base = OTHER; note = 2'-deoxy-2'-fluorouridine-3'-phosphate
  modified_base 10: mod_base = OTHER; note = 2'-O-methylcytidine-3'-phosphate
  modified_base 11: mod_base = OTHER; note = 2'-O-methyluridine-3'-phosphate
  modified_base 12: mod_base = OTHER; note = 2'-O-methyluridine-3'-phosphate
  modified_base 13: mod_base = OTHER; note = 2'-O-methylguanosine-3'-phosphate
  modified_base 14: mod_base = OTHER; note = 2'-deoxy-2'-fluoroguanosine-3'-phosphate
  modified_base 15: mod_base = OTHER; note = 2'-O-methylguanosine-3'-phosphate
  modified_base 16: mod_base = OTHER; note = 2'-deoxy-2'-fluoroadenosine-3'-phosphate
  modified_base 17: mod_base = OTHER; note = 2'-O-methylguanosine-3'-phosphate
  modified_base 18: mod_base = OTHER; note = 2'-O-methylcytidine-3'-phosphate
  modified_base 19: mod_base = OTHER; note = 2'-O-methylguanosine-3'-phosphate
  modified_base 20: mod_base = OTHER; note = 2'-O-methylcytidine-3'-phosphate
  modified_base 21: mod_base = OTHER; note = 2'-O-methyluridine-3'-phosphorothioate
  modified_base 22: mod_base = OTHER; note = 2'-O-methylcytidine-3'-phosphorothioate
  modified_base 23: mod_base = OTHER; note = 2'-O-methyluridine
tagccacttcttgggagcgctct

SEQ ID NO: 642 - RNA, 23 nt, synthetic construct
  source 1..23: mol_type = other RNA
  modified_base 1: mod_base = OTHER; note = 2'-O-methyluridine-3'-phosphorothioate 5'-(E)-Vinylphosphonate
  modified_base 2: mod_base = OTHER; note = 2'-deoxy-2'-fluorocytidine-3'-phosphorothioate
  modified_base 3: mod_base = OTHER; note = 2'-O-methylguanosine-3'-phosphate
  modified_base 4: mod_base = OTHER; note = 2'-O-methyluridine-3'-phosphate
  modified_base 5: mod_base = OTHER; note = 2'-O-methylguanosine-3'-phosphate
  modified_base 6: mod_base = OTHER; note = 2'-deoxy-2'-fluorouridine-3'-phosphate
  modified_base 7: mod_base = OTHER; note = 2'-O-methyladenosine-3'-phosphate
  modified_base 8: mod_base = OTHER; note = 2'-deoxy-2'-fluoroadenosine-3'-phosphate
  modified_base 9: mod_base = OTHER; note = 2'-deoxy-2'-fluoroguanosine-3'-phosphate
  modified_base 10: mod_base = OTHER; note = 2'-O-methylcytidine-3'-phosphate
  modified_base 11: mod_base = OTHER; note = 2'-O-methylcytidine-3'-phosphate
  modified_base 12: mod_base = OTHER; note = 2'-O-methyladenosine-3'-phosphate
  modified_base 13: mod_base = OTHER; note = 2'-O-methylcytidine-3'-phosphate
  modified_base 14: mod_base = OTHER; note = 2'-deoxy-2'-fluorouridine-3'-phosphate
  modified_base 15: mod_base = OTHER; note = 2'-O-methyluridine-3'-phosphate
  modified_base 16: mod_base = OTHER; note = 2'-deoxy-2'-fluorocytidine-3'-phosphate
  modified_base 17: mod_base = OTHER; note = 2'-O-methyluridine-3'-phosphate
  modified_base 18: mod_base = OTHER; note = 2'-O-methyluridine-3'-phosphate
  modified_base 19: mod_base = OTHER; note = 2'-O-methylguanosine-3'-phosphate
  modified_base 20: mod_base = OTHER; note = 2'-O-methylguanosine-3'-phosphate
  modified_base 21: mod_base = OTHER; note = 2'-O-methylguanosine-3'-phosphorothioate
  modified_base 22: mod_base = OTHER; note = 2'-O-methyladenosine-3'-phosphorothioate
  modified_base 23: mod_base = OTHER; note = 2'-O-methylguanosine
tcgtgtaagccacttcttgggag

SEQ ID NO: 643 - RNA, 23 nt, synthetic construct
  source 1..23: mol_type = other RNA
  modified_base 1: mod_base = OTHER; note = 2'-O-methyluridine-3'-phosphorothioate 5'-(E)-Vinylphosphonate
  modified_base 2: mod_base = OTHER; note = 2'-deoxy-2'-fluoroadenosine-3'-phosphorothioate
  modified_base 3: mod_base = OTHER; note = 2'-O-methylcytidine-3'-phosphate
  modified_base 4: mod_base = OTHER; note = 2'-O-methyluridine-3'-phosphate
  modified_base 5: mod_base = OTHER; note = 2'-O-methylguanosine-3'-phosphate
  modified_base 6: mod_base = OTHER; note = 2'-deoxy-2'-fluorouridine-3'-phosphate
  modified_base 7: mod_base = OTHER; note = 2'-O-methylguanosine-3'-phosphate
  modified_base 8: mod_base = OTHER; note = 2'-deoxy-2'-fluoroguanosine-3'-phosphate
  modified_base 9: mod_base = OTHER; note = 2'-deoxy-2'-fluorouridine-3'-phosphate
  modified_base 10: mod_base = OTHER; note = 2'-O-methylcytidine-3'-phosphate
  modified_base 11: mod_base = OTHER; note = 2'-O-methyladenosine-3'-phosphate
  modified_base 12: mod_base = OTHER; note = 2'-O-methylcytidine-3'-phosphate
  modified_base 13: mod_base = OTHER; note = 2'-O-methylcytidine-3'-phosphate
  modified_base 14: mod_base = OTHER; note = 2'-deoxy-2'-fluorouridine-3'-phosphate
  modified_base 15: mod_base = OTHER; note = 2'-O-methyluridine-3'-phosphate
  modified_base 16: mod_base = OTHER; note = 2'-deoxy-2'-fluorocytidine-3'-phosphate
  modified_base 17: mod_base = OTHER; note = 2'-O-methylcytidine-3'-phosphate
  modified_base 18: mod_base = OTHER; note = 2'-O-methylcytidine-3'-phosphate
  modified_base 19: mod_base = OTHER; note = 2'-O-methylguanosine-3'-phosphate
  modified_base 20: mod_base = OTHER; note = 2'-O-methylcytidine-3'-phosphate
  modified_base 21: mod_base = OTHER; note = 2'-O-methyluridine-3'-phosphorothioate
  modified_base 22: mod_base = OTHER; note = 2'-O-methylguanosine-3'-phosphorothioate
  modified_base 23: mod_base = OTHER; note = 2'-O-methyluridine
tactgtggtcaccttcccgctgt

SEQ ID NO: 644 - RNA, 23 nt, synthetic construct
  source 1..23: mol_type = other RNA
  modified_base 1: mod_base = OTHER; note = 2'-O-methyluridine-3'-phosphorothioate 5'-(E)-Vinylphosphonate
  modified_base 2: mod_base = OTHER; note = 2'-deoxy-2'-fluorocytidine-3'-phosphorothioate
  modified_base 3: mod_base = OTHER; note = 2'-O-methyluridine-3'-phosphate
  modified_base 4: mod_base = OTHER; note = 2'-O-methyluridine-3'-phosphate
  modified_base 5: mod_base = OTHER; note = 2'-O-methyluridine-3'-phosphate
  modified_base 6: mod_base = OTHER; note = 2'-deoxy-2'-fluoroguanosine-3'-phosphate
  modified_base 7: mod_base = OTHER; note = 2'-O-methyladenosine-3'-phosphate
  modified_base 8: mod_base = OTHER; note = 2'-deoxy-2'-fluorouridine-3'-phosphate
  modified_base 9: mod_base = OTHER; note = 2'-deoxy-2'-fluoroguanosine-3'-phosphate
  modified_base 10: mod_base = OTHER; note = 2'-O-methyluridine-3'-phosphate
  modified_base 11: mod_base = OTHER; note = 2'-O-methylcytidine-3'-phosphate
  modified_base 12: mod_base = OTHER; note = 2'-O-methylcytidine-3'-phosphate
  modified_base 13: mod_base = OTHER; note = 2'-O-methylguanosine-3'-phosphate
  modified_base 14: mod_base = OTHER; note = 2'-deoxy-2'-fluorouridine-3'-phosphate
  modified_base 15: mod_base = OTHER; note = 2'-O-methylguanosine-3'-phosphate
  modified_base 16: mod_base = OTHER; note = 2'-deoxy-2'-fluorouridine-3'-phosphate
  modified_base 17: mod_base = OTHER; note = 2'-O-methyladenosine-3'-phosphate
  modified_base 18: mod_base = OTHER; note = 2'-O-methyladenosine-3'-phosphate
  modified_base 19: mod_base = OTHER; note = 2'-O-methylguanosine-3'-phosphate
  modified_base 20: mod_base = OTHER; note = 2'-O-methylcytidine-3'-phosphate
  modified_base 21: mod_base = OTHER; note = 2'-O-methylcytidine-3'-phosphorothioate
  modified_base 22: mod_base = OTHER; note = 2'-O-methyladenosine-3'-phosphorothioate
  modified_base 23: mod_base = OTHER; note = 2'-O-methylcytidine
tctttgatgtccgtgtaagccac

SEQ ID NO: 645 - RNA, 23 nt, synthetic construct
  source 1..23: mol_type = other RNA
  modified_base 1: mod_base = OTHER; note = 2'-O-methyluridine-3'-phosphorothioate 5'-(E)-Vinylphosphonate
  modified_base 2: mod_base = OTHER; note = 2'-deoxy-2'-fluorouridine-3'-phosphorothioate
  modified_base 3: mod_base = OTHER; note = 2'-O-methyluridine-3'-phosphate
  modified_base 4: mod_base = OTHER; note = 2'-O-methylguanosine-3'-phosphate
  modified_base 5: mod_base = OTHER; note = 2'-O-methylcytidine-3'-phosphate
  modified_base 6: mod_base = OTHER; note = 2'-deoxy-2'-fluorocytidine-3'-phosphate
  modified_base 7: mod_base = OTHER; note = 2'-O-methyladenosine-3'-phosphate
  modified_base 8: mod_base = OTHER; note = 2'-deoxy-2'-fluoroadenosine-3'-phosphate
  modified_base 9: mod_base = OTHER; note = 2'-deoxy-2'-fluorouridine-3'-phosphate
  modified_base 10: mod_base = OTHER; note = 2'-O-methylcytidine-3'-phosphate
  modified_base 11: mod_base = OTHER; note = 2'-O-methyladenosine-3'-phosphate
  modified_base 12: mod_base = OTHER; note = 2'-O-methylcytidine-3'-phosphate
  modified_base 13: mod_base = OTHER; note = 2'-O-methyluridine-3'-phosphate
  modified_base 14: mod_base = OTHER; note = 2'-deoxy-2'-fluorouridine-3'-phosphate
  modified_base 15: mod_base = OTHER; note = 2'-O-methyluridine-3'-phosphate
  modified_base 16: mod_base = OTHER; note = 2'-deoxy-2'-fluoroguanosine-3'-phosphate
  modified_base 17: mod_base = OTHER; note = 2'-O-methyladenosine-3'-phosphate
  modified_base 18: mod_base = OTHER; note = 2'-O-methyluridine-3'-phosphate
  modified_base 19: mod_base = OTHER; note = 2'-O-methylguanosine-3'-phosphate
  modified_base 20: mod_base = OTHER; note = 2'-O-methyluridine-3'-phosphate
  modified_base 21: mod_base = OTHER; note = 2'-O-methylcytidine-3'-phosphorothioate
  modified_base 22: mod_base = OTHER; note = 2'-O-methylcytidine-3'-phosphorothioate
  modified_base 23: mod_base = OTHER; note = 2'-O-methylguanosine
tttgccaatcactttgatgtccg

SEQ ID NO: 646 - RNA, 23 nt, synthetic construct
  source 1..23: mol_type = other RNA
  modified_base 1: mod_base = OTHER; note = 2'-O-methyluridine-3'-phosphorothioate 5'-(E)-Vinylphosphonate
  modified_base 2: mod_base = OTHER; note = 2'-deoxy-2'-fluoroadenosine-3'-phosphorothioate
  modified_base 3: mod_base = OTHER; note = 2'-O-methyladenosine-3'-phosphate
  modified_base 4: mod_base = OTHER; note = 2'-O-methyladenosine-3'-phosphate
  modified_base 5: mod_base = OTHER; note = 2'-O-methyluridine-3'-phosphate
  modified_base 6: mod_base = OTHER; note = 2'-deoxy-2'-fluoroguanosine-3'-phosphate
  modified_base 7: mod_base = OTHER; note = 2'-O-methyladenosine-3'-phosphate
  modified_base 8: mod_base = OTHER; note = 2'-deoxy-2'-fluoroguanosine-3'-phosphate
  modified_base 9: mod_base = OTHER; note = 2'-deoxy-2'-fluorocytidine-3'-phosphate
  modified_base 10: mod_base = OTHER; note = 2'-O-methylcytidine-3'-phosphate
  modified_base 11: mod_base = OTHER; note = 2'-O-methyladenosine-3'-phosphate
  modified_base 12: mod_base = OTHER; note = 2'-O-methyluridine-3'-phosphate
  modified_base 13: mod_base = OTHER; note = 2'-O-methyluridine-3'-phosphate
  modified_base 14: mod_base = OTHER; note = 2'-deoxy-2'-fluoroguanosine-3'-phosphate
  modified_base 15: mod_base = OTHER; note = 2'-O-methylcytidine-3'-phosphate
  modified_base 16: mod_base = OTHER; note = 2'-deoxy-2'-fluorocytidine-3'-phosphate
  modified_base 17: mod_base = OTHER; note = 2'-O-methyladenosine-3'-phosphate
  modified_base 18: mod_base = OTHER; note = 2'-O-methyladenosine-3'-phosphate
  modified_base 19: mod_base = OTHER; note = 2'-O-methyluridine-3'-phosphate
  modified_base 20: mod_base = OTHER; note = 2'-O-methylcytidine-3'-phosphate
  modified_base 21: mod_base = OTHER; note = 2'-O-methyladenosine-3'-phosphorothioate
  modified_base 22: mod_base = OTHER; note = 2'-O-methylcytidine-3'-phosphorothioate
  modified_base 23: mod_base = OTHER; note = 2'-O-methyluridine
taaatgagccattgccaatcact

SEQ ID NO: 647 - RNA, 23 nt, synthetic construct
  source 1..23: mol_type = other RNA
  modified_base 1: mod_base = OTHER; note = 2'-O-methyluridine-3'-phosphorothioate 5'-(E)-Vinylphosphonate
  modified_base 2: mod_base = OTHER; note = 2'-deoxy-2'-fluoroguanosine-3'-phosphorothioate
  modified_base 3: mod_base = OTHER; note = 2'-O-methylcytidine-3'-phosphate
  modified_base 4: mod_base = OTHER; note = 2'-O-methylguanosine-3'-phosphate
  modified_base 5: mod_base = OTHER; note = 2'-O-methyladenosine-3'-phosphate
  modified_base 6: mod_base = OTHER; note = 2'-deoxy-2'-fluorocytidine-3'-phosphate
  modified_base 7: mod_base = OTHER; note = 2'-O-methyluridine-3'-phosphate
  modified_base 8: mod_base = OTHER; note = 2'-deoxy-2'-fluoroadenosine-3'-phosphate
  modified_base 9: mod_base = OTHER; note = 2'-deoxy-2'-fluoroguanosine-3'-phosphate
  modified_base 10: mod_base = OTHER; note = 2'-O-methyluridine-3'-phosphate
  modified_base 11: mod_base = OTHER; note = 2'-O-methyluridine-3'-phosphate
  modified_base 12: mod_base = OTHER; note = 2'-O-methylcytidine-3'-phosphate
  modified_base 13: mod_base = OTHER; note = 2'-O-methylcytidine-3'-phosphate
  modified_base 14: mod_base = OTHER; note = 2'-deoxy-2'-fluorocytidine-3'-phosphate
  modified_base 15: mod_base = OTHER; note = 2'-O-methyluridine-3'-phosphate
  modified_base 16: mod_base = OTHER; note = 2'-deoxy-2'-fluoroguanosine-3'-phosphate
  modified_base 17: mod_base = OTHER; note = 2'-O-methylguanosine-3'-phosphate
  modified_base 18: mod_base = OTHER; note = 2'-O-methyluridine-3'-phosphate
  modified_base 19: mod_base = OTHER; note = 2'-O-methylcytidine-3'-phosphate
  modified_base 20: mod_base = OTHER; note = 2'-O-methyluridine-3'-phosphate
  modified_base 21: mod_base = OTHER; note = 2'-O-methylcytidine-3'-phosphorothioate
  modified_base 22: mod_base = OTHER; note = 2'-O-methyluridine-3'-phosphorothioate
  modified_base 23: mod_base = OTHER; note = 2'-O-methylguanosine
tgcgactagttccctggtctctg

SEQ ID NO: 648 - RNA, 23 nt, synthetic construct
  source 1..23: mol_type = other RNA
  modified_base 1: mod_base = OTHER; note = 2'-O-methyluridine-3'-phosphorothioate 5'-(E)-Vinylphosphonate
  modified_base 2: mod_base = OTHER; note = 2'-deoxy-2'-fluorouridine-3'-phosphorothioate
  modified_base 3: mod_base = OTHER; note = 2'-O-methyluridine-3'-phosphate
  modified_base 4: mod_base = OTHER; note = 2'-O-methylguanosine-3'-phosphate
  modified_base 5: mod_base = OTHER; note = 2'-O-methyladenosine-3'-phosphate
  modified_base 6: mod_base = OTHER; note = 2'-deoxy-2'-fluorouridine-3'-phosphate
  modified_base 7: mod_base = OTHER; note = 2'-O-methylguanosine-3'-phosphate
  modified_base 8: mod_base = OTHER; note = 2'-deoxy-2'-fluoroguanosine-3'-phosphate
  modified_base 9: mod_base = OTHER; note = 2'-deoxy-2'-fluorocytidine-3'-phosphate
  modified_base 10: mod_base = OTHER; note = 2'-O-methylguanosine-3'-phosphate
  modified_base 11: mod_base = OTHER; note = 2'-O-methyladenosine-3'-phosphate
  modified_base 12: mod_base = OTHER; note = 2'-O-methylcytidine-3'-phosphate
  modified_base 13: mod_base = OTHER; note = 2'-O-methyluridine-3'-phosphate
  modified_base 14: mod_base = OTHER; note = 2'-deoxy-2'-fluoroadenosine-3'-phosphate
  modified_base 15: mod_base = OTHER; note = 2'-O-methylguanosine-3'-phosphate
  modified_base 16: mod_base = OTHER; note = 2'-deoxy-2'-fluorouridine-3'-phosphate
  modified_base 17: mod_base = OTHER; note = 2'-O-methyluridine-3'-phosphate
  modified_base 18: mod_base = OTHER; note = 2'-O-methylcytidine-3'-phosphate
  modified_base 19: mod_base = OTHER; note = 2'-O-methylcytidine-3'-phosphate
  modified_base 20: mod_base = OTHER; note = 2'-O-methylcytidine-3'-phosphate
  modified_base 21: mod_base = OTHER; note = 2'-O-methyluridine-3'-phosphorothioate
  modified_base 22: mod_base = OTHER; note = 2'-O-methylguanosine-3'-phosphorothioate
  modified_base 23: mod_base = OTHER; note = 2'-O-methylguanosine
tttgatggcgactagttccctgg

SEQ ID NO: 649 - RNA, 23 nt, synthetic construct
  source 1..23: mol_type = other RNA
  modified_base 1: mod_base = OTHER; note = 2'-O-methyluridine-3'-phosphorothioate 5'-(E)-Vinylphosphonate
  modified_base 2: mod_base = OTHER; note = 2'-deoxy-2'-fluoroadenosine-3'-phosphorothioate
  modified_base 3: mod_base = OTHER; note = 2'-O-methylcytidine-3'-phosphate
  modified_base 4: mod_base = OTHER; note = 2'-O-methylcytidine-3'-phosphate
  modified_base 5: mod_base = OTHER; note = 2'-O-methyluridine-3'-phosphate
  modified_base 6: mod_base = OTHER; note = 2'-deoxy-2'-fluorouridine-3'-phosphate
  modified_base 7: mod_base = OTHER; note = 2'-O-methylcytidine-3'-phosphate
  modified_base 8: mod_base = OTHER; note = 2'-deoxy-2'-fluorouridine-3'-phosphate
  modified_base 9: mod_base = OTHER; note = 2'-deoxy-2'-fluorouridine-3'-phosphate
  modified_base 10: mod_base = OTHER; note = 2'-O-methylguanosine-3'-phosphate
  modified_base 11: mod_base = OTHER; note = 2'-O-methyladenosine-3'-phosphate
  modified_base 12: mod_base = OTHER; note = 2'-O-methyluridine-3'-phosphate
  modified_base 13: mod_base = OTHER; note = 2'-O-methylguanosine-3'-phosphate
  modified_base 14: mod_base = OTHER; note = 2'-deoxy-2'-fluoroguanosine-3'-phosphate
  modified_base 15: mod_base = OTHER; note = 2'-O-methylcytidine-3'-phosphate
  modified_base 16: mod_base = OTHER; note = 2'-deoxy-2'-fluoroguanosine-3'-phosphate
  modified_base 17: mod_base = OTHER; note = 2'-O-methyladenosine-3'-phosphate
  modified_base 18: mod_base = OTHER; note = 2'-O-methylcytidine-3'-phosphate
  modified_base 19: mod_base = OTHER; note = 2'-O-methyluridine-3'-phosphate
  modified_base 20: mod_base = OTHER; note = 2'-O-methyladenosine-3'-phosphate
  modified_base 21: mod_base = OTHER; note = 2'-O-methylguanosine-3'-phosphorothioate
  modified_base 22: mod_base = OTHER; note = 2'-O-methyluridine-3'-phosphorothioate
  modified_base 23: mod_base = OTHER; note = 2'-O-methyluridine
taccttcttgatggcgactagtt

SEQ ID NO: 650 - RNA, 23 nt, synthetic construct
  source 1..23: mol_type = other RNA
  modified_base 1: mod_base = OTHER; note = 2'-O-methyluridine-3'-phosphorothioate 5'-(E)-Vinylphosphonate
  modified_base 2: mod_base = OTHER; note = 2'-deoxy-2'-fluorouridine-3'-phosphorothioate
  modified_base 3: mod_base = OTHER; note = 2'-O-methylguanosine-3'-phosphate
  modified_base 4: mod_base = OTHER; note = 2'-O-methylguanosine-3'-phosphate
  modified_base 5: mod_base = OTHER; note = 2'-O-methyladenosine-3'-phosphate
  modified_base 6: mod_base = OTHER; note = 2'-deoxy-2'-fluoroguanosine-3'-phosphate
  modified_base 7: mod_base = OTHER; note = 2'-O-methyladenosine-3'-phosphate
  modified_base 8: mod_base = OTHER; note = 2'-deoxy-2'-fluoroadenosine-3'-phosphate
  modified_base 9: mod_base = OTHER; note = 2'-deoxy-2'-fluorocytidine-3'-phosphate
  modified_base 10: mod_base = OTHER; note = 2'-O-methylcytidine-3'-phosphate
  modified_base 11: mod_base = OTHER; note = 2'-O-methyluridine-3'-phosphate
  modified_base 12: mod_base = OTHER; note = 2'-O-methyluridine-3'-phosphate
  modified_base 13: mod_base = OTHER; note = 2'-O-methylcytidine-3'-phosphate
  modified_base 14: mod_base = OTHER; note = 2'-deoxy-2'-fluorouridine-3'-phosphate
  modified_base 15: mod_base = OTHER; note = 2'-O-methyluridine-3'-phosphate
  modified_base 16: mod_base = OTHER; note = 2'-deoxy-2'-fluoroguanosine-3'-phosphate
  modified_base 17: mod_base = OTHER; note = 2'-O-methyladenosine-3'-phosphate
  modified_base 18: mod_base = OTHER; note = 2'-O-methyluridine-3'-phosphate
  modified_base 19: mod_base = OTHER; note = 2'-O-methylguanosine-3'-phosphate
  modified_base 20: mod_base = OTHER; note = 2'-O-methylguanosine-3'-phosphate
  modified_base 21: mod_base = OTHER; note = 2'-O-methylcytidine-3'-phosphorothioate
  modified_base 22: mod_base = OTHER; note = 2'-O-methylguanosine-3'-phosphorothioate
  modified_base 23: mod_base = OTHER; note = 2'-O-methyladenosine
ttggagaaccttcttgatggcga

SEQ ID NO: 651 - RNA, 23 nt, synthetic construct
  source 1..23: mol_type = other RNA
  modified_base 1: mod_base = OTHER; note = 2'-O-methyluridine-3'-phosphorothioate 5'-(E)-Vinylphosphonate
  modified_base 2: mod_base = OTHER; note = 2'-deoxy-2'-fluorouridine-3'-phosphorothioate
  modified_base 3: mod_base = OTHER; note = 2'-O-methyluridine-3'-phosphate
  modified_base 4: mod_base = OTHER; note = 2'-O-methylguanosine-3'-phosphate
  modified_base 5: mod_base = OTHER; note = 2'-O-methyluridine-3'-phosphate
  modified_base 6: mod_base = OTHER; note = 2'-deoxy-2'-fluorocytidine-3'-phosphate
  modified_base 7: mod_base = OTHER; note = 2'-O-methylcytidine-3'-phosphate
  modified_base 8: mod_base = OTHER; note = 2'-deoxy-2'-fluorouridine-3'-phosphate
  modified_base 9: mod_base = OTHER; note = 2'-deoxy-2'-fluoroguanosine-3'-phosphate
  modified_base 10: mod_base = OTHER; note = 2'-O-methylguanosine-3'-phosphate
  modified_base 11: mod_base = OTHER; note = 2'-O-methyladenosine-3'-phosphate
  modified_base 12: mod_base = OTHER; note = 2'-O-methylguanosine-3'-phosphate
  modified_base 13: mod_base = OTHER; note = 2'-O-methyladenosine-3'-phosphate
  modified_base 14: mod_base = OTHER; note = 2'-deoxy-2'-fluoroadenosine-3'-phosphate
  modified_base 15: mod_base = OTHER; note = 2'-O-methylcytidine-3'-phosphate
  modified_base 16: mod_base = OTHER; note = 2'-deoxy-2'-fluorocytidine-3'-phosphate
  modified_base 17: mod_base = OTHER; note = 2'-O-methyluridine-3'-phosphate
  modified_base 18: mod_base = OTHER; note = 2'-O-methyluridine-3'-phosphate
  modified_base 19: mod_base = OTHER; note = 2'-O-methylcytidine-3'-phosphate
  modified_base 20: mod_base = OTHER; note = 2'-O-methyluridine-3'-phosphate
  modified_base 21: mod_base = OTHER; note = 2'-O-methyluridine-3'-phosphorothioate
  modified_base 22: mod_base = OTHER; note = 2'-O-methylguanosine-3'-phosphorothioate
  modified_base 23: mod_base = OTHER; note = 2'-O-methyladenosine
tttgtcctggagaaccttcttga

SEQ ID NO: 652 - RNA, 23 nt, synthetic construct
  source 1..23: mol_type = other RNA
  modified_base 1: mod_base = OTHER; note = 2'-O-methyluridine-3'-phosphorothioate 5'-(E)-Vinylphosphonate
  modified_base 2: mod_base = OTHER; note = 2'-deoxy-2'-fluorouridine-3'-phosphorothioate
  modified_base 3: mod_base = OTHER; note = 2'-O-methylcytidine-3'-phosphate
  modified_base 4: mod_base = OTHER; note = 2'-O-methyluridine-3'-phosphate
  modified_base 5: mod_base = OTHER; note = 2'-O-methyluridine-3'-phosphate
  modified_base 6: mod_base = OTHER; note = 2'-deoxy-2'-fluoroguanosine-3'-phosphate
  modified_base 7: mod_base = OTHER; note = 2'-O-methyladenosine-3'-phosphate
  modified_base 8: mod_base = OTHER; note = 2'-deoxy-2'-fluoroadenosine-3'-phosphate
  modified_base 9: mod_base = OTHER; note = 2'-deoxy-2'-fluorocytidine-3'-phosphate
  modified_base 10: mod_base = OTHER; note = 2'-O-methylcytidine-3'-phosphate
  modified_base 11: mod_base = OTHER; note = 2'-O-methyluridine-3'-phosphate
  modified_base 12: mod_base = OTHER; note = 2'-O-methylcytidine-3'-phosphate
  modified_base 13: mod_base = OTHER; note = 2'-O-methyluridine-3'-phosphate
  modified_base 14: mod_base = OTHER; note = 2'-deoxy-2'-fluorouridine-3'-phosphate
  modified_base 15: mod_base = OTHER; note = 2'-O-methylguanosine-3'-phosphate
  modified_base 16: mod_base = OTHER; note = 2'-deoxy-2'-fluorouridine-3'-phosphate
  modified_base 17: mod_base = OTHER; note = 2'-O-methylcytidine-3'-phosphate
  modified_base 18: mod_base = OTHER; note = 2'-O-methylcytidine-3'-phosphate
  modified_base 19: mod_base = OTHER; note = 2'-O-methyluridine-3'-phosphate
  modified_base 20: mod_base = OTHER; note = 2'-O-methylguanosine-3'-phosphate
  modified_base 21: mod_base = OTHER; note = 2'-O-methylguanosine-3'-phosphorothioate
  modified_base 22: mod_base = OTHER; note = 2'-O-methyladenosine-3'-phosphorothioate
  modified_base 23: mod_base = OTHER; note = 2'-O-methylguanosine
ttcttgaacctcttgtcctggag

SEQ ID NO: 653 - RNA, 23 nt, synthetic construct
  source 1..23: mol_type = other RNA
  modified_base 1: mod_base = OTHER; note = 2'-O-methyluridine-3'-phosphorothioate 5'-(E)-Vinylphosphonate
  modified_base 2: mod_base = OTHER; note = 2'-deoxy-2'-fluoroadenosine-3'-phosphorothioate
  modified_base 3: mod_base = OTHER; note = 2'-O-methylguanosine-3'-phosphate
  modified_base 4: mod_base = OTHER; note = 2'-O-methylcytidine-3'-phosphate
  modified_base 5: mod_base = OTHER; note = 2'-O-methyluridine-3'-phosphate
  modified_base 6: mod_base = OTHER; note = 2'-deoxy-2'-fluorocytidine-3'-phosphate
  modified_base 7: mod_base = OTHER; note = 2'-O-methyluridine-3'-phosphate
  modified_base 8: mod_base = OTHER; note = 2'-deoxy-2'-fluorocytidine-3'-phosphate
  modified_base 9: mod_base = OTHER; note = 2'-deoxy-2'-fluoroguanosine-3'-phosphate
  modified_base 10: mod_base = OTHER; note = 2'-O-methylguanosine-3'-phosphate
  modified_base 11: mod_base = OTHER; note = 2'-O-methyluridine-3'-phosphate
  modified_base 12: mod_base = OTHER; note = 2'-O-methyluridine-3'-phosphate
  modified_base 13: mod_base = OTHER; note = 2'-O-methylcytidine-3'-phosphate
  modified_base 14: mod_base = OTHER; note = 2'-deoxy-2'-fluorouridine-3'-phosphate
  modified_base 15: mod_base = OTHER; note = 2'-O-methyluridine-3'-phosphate
  modified_base 16: mod_base = OTHER; note = 2'-deoxy-2'-fluoroguanosine-3'-phosphate
  modified_base 17: mod_base = OTHER; note = 2'-O-methyladenosine-3'-phosphate
  modified_base 18: mod_base = OTHER; note = 2'-O-methyladenosine-3'-phosphate
  modified_base 19: mod_base = OTHER; note = 2'-O-methylcytidine-3'-phosphate
  modified_base 20: mod_base = OTHER; note = 2'-O-methylcytidine-3'-phosphate
  modified_base 21: mod_base = OTHER; note = 2'-O-methyluridine-3'-phosphorothioate
  modified_base 22: mod_base = OTHER; note = 2'-O-methylcytidine-3'-phosphorothioate
  modified_base 23: mod_base = OTHER; note = 2'-O-methyluridine
tagctctcggttcttgaacctct

SEQ ID NO: 654 - RNA, 23 nt, synthetic construct
  source 1..23: mol_type = other RNA
  modified_base 1: mod_base = OTHER; note = 2'-O-methyluridine-3'-phosphorothioate 5'-(E)-Vinylphosphonate
  modified_base 2: mod_base = OTHER; note = 2'-deoxy-2'-fluoroadenosine-3'-phosphorothioate
  modified_base 3: mod_base = OTHER; note = 2'-O-methyluridine-3'-phosphate
  modified_base 4: mod_base = OTHER; note = 2'-O-methylcytidine-3'-phosphate
  modified_base 5: mod_base = OTHER; note = 2'-O-methyluridine-3'-phosphate
  modified_base 6: mod_base = OTHER; note = 2'-deoxy-2'-fluoroguanosine-3'-phosphate
  modified_base 7: mod_base = OTHER; note = 2'-O-methylcytidine-3'-phosphate
  modified_base 8: mod_base = OTHER; note = 2'-deoxy-2'-fluoroadenosine-3'-phosphate
  modified_base 9: mod_base = OTHER; note = 2'-deoxy-2'-fluoroguanosine-3'-phosphate
  modified_base 10: mod_base = OTHER; note = 2'-O-methylcytidine-3'-phosphate
  modified_base 11: mod_base = OTHER; note = 2'-O-methyluridine-3'-phosphate
  modified_base 12: mod_base = OTHER; note = 2'-O-methylcytidine-3'-phosphate
  modified_base 13: mod_base = OTHER; note = 2'-O-methyluridine-3'-phosphate
  modified_base 14: mod_base = OTHER; note = 2'-deoxy-2'-fluorocytidine-3'-phosphate
  modified_base 15: mod_base = OTHER; note = 2'-O-methylguanosine-3'-phosphate
  modified_base 16: mod_base = OTHER; note = 2'-deoxy-2'-fluoroguanosine-3'-phosphate
  modified_base 17: mod_base = OTHER; note = 2'-O-methyluridine-3'-phosphate
  modified_base 18: mod_base = OTHER; note = 2'-O-methyluridine-3'-phosphate
  modified_base 19: mod_base = OTHER; note = 2'-O-methylcytidine-3'-phosphate
  modified_base 20: mod_base = OTHER; note = 2'-O-methyluridine-3'-phosphate
  modified_base 21: mod_base = OTHER; note = 2'-O-methyluridine-3'-phosphorothioate
  modified_base 22: mod_base = OTHER; note = 2'-O-methylguanosine-3'-phosphorothioate
  modified_base 23: mod_base = OTHER; note = 2'-O-methyladenosine
tatctgcagctctcggttcttga

SEQ ID NO: 655 - RNA, 23 nt, synthetic construct
  source 1..23: mol_type = other RNA
  modified_base 1: mod_base = OTHER; note = 2'-O-methyluridine-3'-phosphorothioate 5'-(E)-Vinylphosphonate
  modified_base 2: mod_base = OTHER; note = 2'-deoxy-2'-fluorocytidine-3'-phosphorothioate
  modified_base 3: mod_base = OTHER; note = 2'-O-methylguanosine-3'-phosphate
  modified_base 4: mod_base = OTHER; note = 2'-O-methylcytidine-3'-phosphate
  modified_base 5: mod_base = OTHER; note = 2'-O-methyladenosine-3'-phosphate
  modified_base 6: mod_base = OTHER; note = 2'-deoxy-2'-fluorouridine-3'-phosphate
  modified_base 7: mod_base = OTHER; note = 2'-O-methylguanosine-3'-phosphate
  modified_base 8: mod_base = OTHER; note = 2'-deoxy-2'-fluoroadenosine-3'-phosphate
  modified_base 9: mod_base = OTHER; note = 2'-deoxy-2'-fluorouridine-3'-phosphate
  modified_base 10: mod_base = OTHER; note = 2'-O-methylcytidine-3'-phosphate
  modified_base 11: mod_base = OTHER; note = 2'-O-methyluridine-3'-phosphate
  modified_base 12: mod_base = OTHER; note = 2'-O-methylguanosine-3'-phosphate
  modified_base 13: mod_base = OTHER; note = 2'-O-methylcytidine-3'-phosphate
  modified_base 14: mod_base = OTHER; note = 2'-deoxy-2'-fluoroadenosine-3'-phosphate
  modified_base 15: mod_base = OTHER; note = 2'-O-methylguanosine-3'-phosphate
  modified_base 16: mod_base = OTHER; note = 2'-deoxy-2'-fluorocytidine-3'-phosphate
  modified_base 17: mod_base = OTHER; note = 2'-O-methyluridine-3'-phosphate
  modified_base 18: mod_base = OTHER; note = 2'-O-methylcytidine-3'-phosphate
  modified_base 19: mod_base = OTHER; note = 2'-O-methyluridine-3'-phosphate
  modified_base 20: mod_base = OTHER; note = 2'-O-methylcytidine-3'-phosphate
  modified_base 21: mod_base = OTHER; note = 2'-O-methylguanosine-3'-phosphorothioate
  modified_base 22: mod_base = OTHER; note = 2'-O-methylguanosine-3'-phosphorothioate
  modified_base 23: mod_base = OTHER; note = 2'-O-methyluridine
tcgcatgatctgcagctctcggt

SEQ ID NO: 656 - RNA, 23 nt, synthetic construct
  source 1..23: mol_type = other RNA
  modified_base 1: mod_base = OTHER; note = 2'-O-methyluridine-3'-phosphorothioate 5'-(E)-Vinylphosphonate
  modified_base 2: mod_base = OTHER; note = 2'-deoxy-2'-fluoroadenosine-3'-phosphorothioate
  modified_base 3: mod_base = OTHER; note = 2'-O-methylguanosine-3'-phosphate
  modified_base 4: mod_base = OTHER; note = 2'-O-methylcytidine-3'-phosphate
  modified_base 5: mod_base = OTHER; note = 2'-O-methyluridine-3'-phosphate
  modified_base 6: mod_base = OTHER; note = 2'-deoxy-2'-fluorouridine-3'-phosphate
  modified_base 7: mod_base = OTHER; note = 2'-O-methyladenosine-3'-phosphate
  modified_base 8: mod_base = OTHER; note = 2'-deoxy-2'-fluorocytidine-3'-phosphate
  modified_base 9: mod_base = OTHER; note = 2'-deoxy-2'-fluoroguanosine-3'-phosphate
  modified_base 10: mod_base = OTHER; note = 2'-O-methylcytidine-3'-phosphate
  modified_base 11: mod_base = OTHER; note = 2'-O-methyladenosine-3'-phosphate
  modified_base 12: mod_base = OTHER; note = 2'-O-methyluridine-3'-phosphate
  modified_base 13: mod_base = OTHER; note = 2'-O-methylguanosine-3'-phosphate
  modified_base 14: mod_base = OTHER; note = 2'-deoxy-2'-fluoroadenosine-3'-phosphate
  modified_base 15: mod_base = OTHER; note = 2'-O-methyluridine-3'-phosphate
  modified_base 16: mod_base = OTHER; note = 2'-deoxy-2'-fluorocytidine-3'-phosphate
  modified_base 17: mod_base = OTHER; note = 2'-O-methyluridine-3'-phosphate
  modified_base 18: mod_base = OTHER; note = 2'-O-methylguanosine-3'-phosphate
  modified_base 19: mod_base = OTHER; note = 2'-O-methylcytidine-3'-phosphate
  modified_base 20: mod_base = OTHER; note = 2'-O-methyladenosine-3'-phosphate
  modified_base 21: mod_base = OTHER; note = 2'-O-methylguanosine-3'-phosphorothioate
  modified_base 22: mod_base = OTHER; note = 2'-O-methylcytidine-3'-phosphorothioate
  modified_base 23: mod_base = OTHER; note = 2'-O-methyluridine
tagcttacgcatgatctgcagct

SEQ ID NO: 657 - RNA, 23 nt, synthetic construct
  source 1..23: mol_type = other RNA
  modified_base 1: mod_base = OTHER; note = 2'-O-methyluridine-3'-phosphorothioate 5'-(E)-Vinylphosphonate
  modified_base 2: mod_base = OTHER; note = 2'-deoxy-2'-fluoroadenosine-3'-phosphorothioate
  modified_base 3: mod_base = OTHER; note = 2'-O-methylguanosine-3'-phosphate
  modified_base 4: mod_base = OTHER; note = 2'-O-methyluridine-3'-phosphate
  modified_base 5: mod_base = OTHER; note = 2'-O-methylguanosine-3'-phosphate
  modified_base 6: mod_base = OTHER; note = 2'-deoxy-2'-fluoroguanosine-3'-phosphate
  modified_base 7: mod_base = OTHER; note = 2'-O-methyluridine-3'-phosphate
  modified_base 8: mod_base = OTHER; note = 2'-deoxy-2'-fluorocytidine-3'-phosphate
  modified_base 9: mod_base = OTHER; note = 2'-deoxy-2'-fluorocytidine-3'-phosphate
  modified_base 10: mod_base = OTHER; note = 2'-O-methyladenosine-3'-phosphate
  modified_base 11: mod_base = OTHER; note = 2'-O-methylguanosine-3'-phosphate
  modified_base 12: mod_base = OTHER; note = 2'-O-methylcytidine-3'-phosphate
  modified_base 13: mod_base = OTHER; note = 2'-O-methyluridine-3'-phosphate
  modified_base 14: mod_base = OTHER; note = 2'-deoxy-2'-fluorouridine-3'-phosphate
  modified_base 15: mod_base = OTHER; note = 2'-O-methyladenosine-3'-phosphate
  modified_base 16: mod_base = OTHER; note = 2'-deoxy-2'-fluorocytidine-3'-phosphate
  modified_base 17: mod_base = OTHER; note = 2'-O-methylguanosine-3'-phosphate
  modified_base 18: mod_base = OTHER; note = 2'-O-methylcytidine-3'-phosphate
  modified_base 19: mod_base = OTHER; note = 2'-O-methyladenosine-3'-phosphate
  modified_base 20: mod_base = OTHER; note = 2'-O-methyluridine-3'-phosphate
  modified_base 21: mod_base = OTHER; note = 2'-O-methylguanosine-3'-phosphorothioate
  modified_base 22: mod_base = OTHER; note = 2'-O-methyladenosine-3'-phosphorothioate
  modified_base 23: mod_base = OTHER; note = 2'-O-methyluridine
tagtggtccagcttacgcatgat

SEQ ID NO: 658 - RNA, 23 nt, synthetic construct
  source 1..23: mol_type = other RNA
  modified_base 1: mod_base = OTHER; note = 2'-O-methyluridine-3'-phosphorothioate 5'-(E)-Vinylphosphonate
  modified_base 2: mod_base = OTHER; note = 2'-deoxy-2'-fluorouridine-3'-phosphorothioate
  modified_base 3: mod_base = OTHER; note = 2'-O-methylcytidine-3'-phosphate
  modified_base 4: mod_base = OTHER; note = 2'-O-methyladenosine-3'-phosphate
  modified_base 5: mod_base = OTHER; note = 2'-O-methylguanosine-3'-phosphate
  modified_base 6: mod_base = OTHER; note = 2'-deoxy-2'-fluorocytidine-3'-phosphate
  modified_base 7: mod_base = OTHER; note = 2'-O-methylcytidine-3'-phosphate
  modified_base 8: mod_base = OTHER; note = 2'-deoxy-2'-fluorouridine-3'-phosphate
  modified_base 9: mod_base = OTHER; note = 2'-deoxy-2'-fluorocytidine-3'-phosphate
  modified_base 10: mod_base = OTHER; note = 2'-O-methyladenosine-3'-phosphate
  modified_base 11: mod_base = OTHER; note = 2'-O-methylcytidine-3'-phosphate
  modified_base 12: mod_base = OTHER; note = 2'-O-methyladenosine-3'-phosphate
  modified_base 13: mod_base = OTHER; note = 2'-O-methyladenosine-3'-phosphate
  modified_base 14: mod_base = OTHER; note = 2'-deoxy-2'-fluorouridine-3'-phosphate
  modified_base 15: mod_base = OTHER; note = 2'-O-methyladenosine-3'-phosphate
  modified_base 16: mod_base = OTHER; note = 2'-deoxy-2'-fluorouridine-3'-phosphate
  modified_base 17: mod_base = OTHER; note = 2'-O-methyluridine-3'-phosphate
  modified_base 18: mod_base = OTHER; note = 2'-O-methylguanosine-3'-phosphate
  modified_base 19: mod_base = OTHER; note = 2'-O-methylcytidine-3'-phosphate
  modified_base 20: mod_base = OTHER; note = 2'-O-methyladenosine-3'-phosphate
  modified_base 21: mod_base = OTHER; note = 2'-O-methylguanosine-3'-phosphorothioate
  modified_base 22: mod_base = OTHER; note = 2'-O-methyluridine-3'-phosphorothioate
  modified_base 23: mod_base = OTHER; note = 2'-O-methylguanosine
ttcagcctcacaatattgcagtg

SEQ ID NO: 659 - RNA, 23 nt, synthetic construct
  source 1..23: mol_type = other RNA
  modified_base 1: mod_base = OTHER; note = 2'-O-methyluridine-3'-phosphorothioate 5'-(E)-Vinylphosphonate
  modified_base 2: mod_base = OTHER; note = 2'-deoxy-2'-fluoroadenosine-3'-phosphorothioate
  modified_base 3: mod_base = OTHER; note = 2'-O-methyladenosine-3'-phosphate
  modified_base 4: mod_base = OTHER; note = 2'-O-methyladenosine-3'-phosphate
  modified_base 5: mod_base = OTHER; note = 2'-O-methyladenosine-3'-phosphate
  modified_base 6: mod_base = OTHER; note = 2'-deoxy-2'-fluoroguanosine-3'-phosphate
  modified_base 7: mod_base = OTHER; note = 2'-O-methyluridine-3'-phosphate
  modified_base 8: mod_base = OTHER; note = 2'-deoxy-2'-fluoroadenosine-3'-phosphate
  modified_base 9: mod_base = OTHER; note = 2'-deoxy-2'-fluorouridine-3'-phosphate
  modified_base 10: mod_base = OTHER; note = 2'-O-methylcytidine-3'-phosphate
  modified_base 11: mod_base = OTHER; note = 2'-O-methyluridine-3'-phosphate
  modified_base 12: mod_base = OTHER; note = 2'-O-methylcytidine-3'-phosphate
  modified_base 13: mod_base = OTHER; note = 2'-O-methyladenosine-3'-phosphate
  modified_base 14: mod_base = OTHER; note = 2'-deoxy-2'-fluoroguanosine-3'-phosphate
  modified_base 15: mod_base = OTHER; note = 2'-O-methylcytidine-3'-phosphate
  modified_base 16: mod_base = OTHER; note = 2'-deoxy-2'-fluorocytidine-3'-phosphate
  modified_base 17: mod_base = OTHER; note = 2'-O-methyluridine-3'-phosphate
  modified_base 18: mod_base = OTHER; note = 2'-O-methylcytidine-3'-phosphate
  modified_base 19: mod_base = OTHER; note = 2'-O-methyladenosine-3'-phosphate
  modified_base 20: mod_base = OTHER; note = 2'-O-methylcytidine-3'-phosphate
  modified_base 21: mod_base = OTHER; note = 2'-O-methyladenosine-3'-phosphorothioate
  modified_base 22: mod_base = OTHER; note = 2'-O-methyladenosine-3'-phosphorothioate
  modified_base 23: mod_base = OTHER; note = 2'-O-methyluridine
taaaagtatctcagcctcacaat

SEQ ID NO: 660 - RNA, 23 nt, synthetic construct
  source 1..23: mol_type = other RNA
  modified_base 1: mod_base = OTHER; note = 2'-O-methyluridine-3'-phosphorothioate 5'-(E)-Vinylphosphonate
  modified_base 2: mod_base = OTHER; note = 2'-deoxy-2'-fluoroadenosine-3'-phosphorothioate
  modified_base 3: mod_base = OTHER; note = 2'-O-methylguanosine-3'-phosphate
  modified_base 4: mod_base = OTHER; note = 2'-O-methyluridine-3'-phosphate
  modified_base 5: mod_base = OTHER; note = 2'-O-methyladenosine-3'-phosphate
  modified_base 6: mod_base = OTHER; note = 2'-deoxy-2'-fluoroguanosine-3'-phosphate
  modified_base 7: mod_base = OTHER; note = 2'-O-methyladenosine-3'-phosphate
  modified_base 8: mod_base = OTHER; note = 2'-deoxy-2'-fluoroadenosine-3'-phosphate
  modified_base 9: mod_base = OTHER; note = 2'-deoxy-2'-fluoroadenosine-3'-phosphate
  modified_base 10: mod_base = OTHER; note = 2'-O-methyladenosine-3'-phosphate
  modified_base 11: mod_base = OTHER; note = 2'-O-methyladenosine-3'-phosphate
  modified_base 12: mod_base = OTHER; note = 2'-O-methylguanosine-3'-phosphate
  modified_base 13: mod_base = OTHER; note = 2'-O-methyluridine-3'-phosphate
  modified_base 14: mod_base = OTHER; note = 2'-deoxy-2'-fluoroadenosine-3'-phosphate
  modified_base 15: mod_base = OTHER; note = 2'-O-methyluridine-3'-phosphate
  modified_base 16: mod_base = OTHER; note = 2'-deoxy-2'-fluorocytidine-3'-phosphate
  modified_base 17: mod_base = OTHER; note = 2'-O-methyluridine-3'-phosphate
  modified_base 18: mod_base = OTHER; note = 2'-O-methylcytidine-3'-phosphate
  modified_base 19: mod_base = OTHER; note = 2'-O-methyladenosine-3'-phosphate
  modified_base 20: mod_base = OTHER; note = 2'-O-methylguanosine-3'-phosphate
  modified_base 21: mod_base = OTHER; note = 2'-O-methylcytidine-3'-phosphorothioate
  modified_base 22: mod_base = OTHER; note = 2'-O-methylcytidine-3'-phosphorothioate
  modified_base 23: mod_base = OTHER; note = 2'-O-methyluridine
tagtagaaaaagtatctcagcct

SEQ ID NO: 661 - RNA, 23 nt, synthetic construct
  source 1..23: mol_type = other RNA
  modified_base 1: mod_base = OTHER; note = 2'-O-methyluridine-3'-phosphorothioate 5'-(E)-Vinylphosphonate
  modified_base 2: mod_base = OTHER; note = 2'-deoxy-2'-fluorocytidine-3'-phosphorothioate
  modified_base 3: mod_base = OTHER; note = 2'-O-methyladenosine-3'-phosphate
  modified_base 4: mod_base = OTHER; note = 2'-O-methylcytidine-3'-phosphate
  modified_base 5: mod_base = OTHER; note = 2'-O-methyluridine-3'-phosphate
  modified_base 6: mod_base = OTHER; note = 2'-deoxy-2'-fluoroguanosine-3'-phosphate
  modified_base 7: mod_base = OTHER; note = 2'-O-methylguanosine-3'-phosphate
  modified_base 8: mod_base = OTHER; note = 2'-deoxy-2'-fluoroadenosine-3'-phosphate
  modified_base 9: mod_base = OTHER; note = 2'-deoxy-2'-fluoroguanosine-3'-phosphate
  modified_base 10: mod_base = OTHER; note = 2'-O-methyluridine-3'-phosphate
  modified_base 11: mod_base = OTHER; note = 2'-O-methyladenosine-3'-phosphate
  modified_base 12: mod_base = OTHER; note = 2'-O-methylguanosine-3'-phosphate
  modified_base 13: mod_base = OTHER; note = 2'-O-methyladenosine-3'-phosphate
  modified_base 14: mod_base = OTHER; note = 2'-deoxy-2'-fluoroadenosine-3'-phosphate
  modified_base 15: mod_base = OTHER; note = 2'-O-methyladenosine-3'-phosphate
  modified_base 16: mod_base = OTHER; note = 2'-deoxy-2'-fluoroadenosine-3'-phosphate
  modified_base 17: mod_base = OTHER; note = 2'-O-methyladenosine-3'-phosphate
  modified_base 18: mod_base = OTHER; note = 2'-O-methylguanosine-3'-phosphate
  modified_base 19: mod_base = OTHER; note = 2'-O-methyluridine-3'-phosphate
  modified_base 20: mod_base = OTHER; note = 2'-O-methyladenosine-3'-phosphate
  modified_base 21: mod_base = OTHER; note = 2'-O-methyluridine-3'-phosphorothioate
  modified_base 22: mod_base = OTHER; note = 2'-O-methylcytidine-3'-phosphorothioate
  modified_base 23: mod_base = OTHER; note = 2'-O-methyluridine
tcactggagtagaaaaagtatct

SEQ ID NO: 662 - RNA, 23 nt, synthetic construct
  source 1..23: mol_type = other RNA
  modified_base 1: mod_base = OTHER; note = 2'-O-methyluridine-3'-phosphorothioate 5'-(E)-Vinylphosphonate
  modified_base 2: mod_base = OTHER; note = 2'-deoxy-2'-fluorouridine-3'-phosphorothioate
  modified_base 3: mod_base = OTHER; note = 2'-O-methylcytidine-3'-phosphate
  modified_base 4: mod_base = OTHER; note = 2'-O-methyluridine-3'-phosphate
  modified_base 5: mod_base = OTHER; note = 2'-O-methylcytidine-3'-phosphate
  modified_base 6: mod_base = OTHER; note = 2'-deoxy-2'-fluoroguanosine-3'-phosphate
  modified_base 7: mod_base = OTHER; note = 2'-O-methylcytidine-3'-phosphate
  modified_base 8: mod_base = OTHER; note = 2'-deoxy-2'-fluorocytidine-3'-phosphate
  modified_base 9: mod_base = OTHER; note = 2'-deoxy-2'-fluoroadenosine-3'-phosphate
  modified_base 10: mod_base = OTHER; note = 2'-O-methylcytidine-3'-phosphate
  modified_base 11: mod_base = OTHER; note = 2'-O-methyluridine-3'-phosphate
  modified_base 12: mod_base = OTHER; note = 2'-O-methylguanosine-3'-phosphate
  modified_base 13: mod_base = OTHER; note = 2'-O-methylguanosine-3'-phosphate
  modified_base 14: mod_base = OTHER; note = 2'-deoxy-2'-fluoroadenosine-3'-phosphate
  modified_base 15: mod_base = OTHER; note = 2'-O-methylguanosine-3'-phosphate
  modified_base 16: mod_base = OTHER; note = 2'-deoxy-2'-fluorouridine-3'-phosphate
  modified_base 17: mod_base = OTHER; note = 2'-O-methyladenosine-3'-phosphate
  modified_base 18: mod_base = OTHER; note = 2'-O-methylguanosine-3'-phosphate
  modified_base 19: mod_base = OTHER; note = 2'-O-methyladenosine-3'-phosphate
  modified_base 20: mod_base = OTHER; note = 2'-O-methyladenosine-3'-phosphate
  modified_base 21: mod_base = OTHER; note = 2'-O-methyladenosine-3'-phosphorothioate
  modified_base 22: mod_base = OTHER; note = 2'-O-methyladenosine-3'-phosphorothioate
  modified_base 23: mod_base = OTHER; note = 2'-O-methyladenosine
ttctcgccactggagtagaaaaa

SEQ ID NO: 663 - RNA, 23 nt, synthetic construct
  source 1..23: mol_type = other RNA
  modified_base 1: mod_base = OTHER; note = 2'-O-methyluridine-3'-phosphorothioate 5'-(E)-Vinylphosphonate
  modified_base 2: mod_base = OTHER; note = 2'-deoxy-2'-fluorouridine-3'-phosphorothioate
  modified_base 3: mod_base = OTHER; note = 2'-O-methylcytidine-3'-phosphate
  modified_base 4: mod_base = OTHER; note = 2'-O-methyluridine-3'-phosphate
  modified_base 5: mod_base = OTHER; note = 2'-O-methyluridine-3'-phosphate
  modified_base 6: mod_base = OTHER; note = 2'-deoxy-2'-fluorouridine-3'-phosphate
  modified_base 7: mod_base = OTHER; note = 2'-O-methylcytidine-3'-phosphate
  modified_base 8: mod_base = OTHER; note = 2'-deoxy-2'-fluorouridine-3'-phosphate
  modified_base 9: mod_base = OTHER; note = 2'-deoxy-2'-fluorouridine-3'-phosphate
  modified_base 10: mod_base = OTHER; note = 2'-O-methylcytidine-3'-phosphate
  modified_base 11: mod_base = OTHER; note = 2'-O-methyluridine-3'-phosphate
  modified_base 12: mod_base = OTHER; note = 2'-O-methylcytidine-3'-phosphate
  modified_base 13: mod_base = OTHER; note = 2'-O-methylguanosine-3'-phosphate
  modified_base 14: mod_base = OTHER; note = 2'-deoxy-2'-fluorocytidine-3'-phosphate
  modified_base 15: mod_base = OTHER; note = 2'-O-methylcytidine-3'-phosphate
  modified_base 16: mod_base = OTHER; note = 2'-deoxy-2'-fluoroadenosine-3'-phosphate
  modified_base 17: mod_base = OTHER; note = 2'-O-methylcytidine-3'-phosphate
  modified_base 18: mod_base = OTHER; note = 2'-O-methyluridine-3'-phosphate
  modified_base 19: mod_base = OTHER; note = 2'-O-methylguanosine-3'-phosphate
  modified_base 20: mod_base = OTHER; note = 2'-O-methylguanosine-3'-phosphate
  modified_base 21: mod_base = OTHER; note = 2'-O-methyladenosine-3'-phosphorothioate
  modified_base 22: mod_base = OTHER; note = 2'-O-methylguanosine-3'-phosphorothioate
  modified_base 23: mod_base = OTHER; note = 2'-O-methyluridine
ttctttcttctcgccactggagt

SEQ ID NO: 664 - RNA, 23 nt, synthetic construct
  source 1..23: mol_type = other RNA
  modified_base 1: mod_base = OTHER; note = 2'-O-methyluridine-3'-phosphorothioate 5'-(E)-Vinylphosphonate
  modified_base 2: mod_base = OTHER; note = 2'-deoxy-2'-fluoroadenosine-3'-phosphorothioate
  modified_base 3: mod_base = OTHER; note = 2'-O-methylguanosine-3'-phosphate
  modified_base 4: mod_base = OTHER; note = 2'-O-methylcytidine-3'-phosphate
  modified_base 5: mod_base = OTHER; note = 2'-O-methyluridine-3'-phosphate
  modified_base 6: mod_base = OTHER; note = 2'-deoxy-2'-fluorocytidine-3'-phosphate
  modified_base 7: mod_base = OTHER; note = 2'-O-methylguanosine-3'-phosphate
  modified_base 8: mod_base = OTHER; note = 2'-deoxy-2'-fluorouridine-3'-phosphate
  modified_base 9: mod_base = OTHER; note = 2'-deoxy-2'-fluorocytidine-3'-phosphate
  modified_base 10: mod_base = OTHER; note = 2'-O-methyluridine-3'-phosphate
  modified_base 11: mod_base = OTHER; note = 2'-O-methyluridine-3'-phosphate
  modified_base 12: mod_base = OTHER; note = 2'-O-methyluridine-3'-phosphate
  modified_base 13: mod_base = OTHER; note = 2'-O-methylcytidine-3'-phosphate
  modified_base 14: mod_base = OTHER; note = 2'-deoxy-2'-fluorouridine-3'-phosphate
  modified_base 15: mod_base = OTHER; note = 2'-O-methyluridine-3'-phosphate
  modified_base 16: mod_base = OTHER; note = 2'-deoxy-2'-fluorocytidine-3'-phosphate
  modified_base 17: mod_base = OTHER; note = 2'-O-methyluridine-3'-phosphate
  modified_base 18: mod_base = OTHER; note = 2'-O-methylcytidine-3'-phosphate
  modified_base 19: mod_base = OTHER; note = 2'-O-methylguanosine-3'-phosphate
  modified_base 20: mod_base = OTHER; note = 2'-O-methylcytidine-3'-phosphate
  modified_base 21: mod_base = OTHER; note = 2'-O-methylcytidine-3'-phosphorothioate
  modified_base 22: mod_base = OTHER; note = 2'-O-methyladenosine-3'-phosphorothioate
  modified_base 23: mod_base = OTHER; note = 2'-O-methylcytidine
tagctcgtctttcttctcgccac

SEQ ID NO: 665 - RNA, 23 nt, synthetic construct
  source 1..23: mol_type = other RNA
  modified_base 1: mod_base = OTHER; note = 2'-O-methyluridine-3'-phosphorothioate 5'-(E)-Vinylphosphonate
  modified_base 2: mod_base = OTHER; note = 2'-deoxy-2'-fluoroadenosine-3'-phosphorothioate
  modified_base 3: mod_base = OTHER; note = 2'-O-methylguanosine-3'-phosphate
  modified_base 4: mod_base = OTHER; note = 2'-O-methylguanosine-3'-phosphate
  modified_base 5: mod_base = OTHER; note = 2'-O-methyluridine-3'-phosphate
  modified_base 6: mod_base = OTHER; note = 2'-deoxy-2'-fluoroadenosine-3'-phosphate
  modified_base 7: mod_base = OTHER; note = 2'-O-methyladenosine-3'-phosphate
  modified_base 8: mod_base = OTHER; note = 2'-deoxy-2'-fluoroadenosine-3'-phosphate
  modified_base 9: mod_base = OTHER; note = 2'-deoxy-2'-fluoroguanosine-3'-phosphate
  modified_base 10: mod_base = OTHER; note = 2'-O-methylcytidine-3'-phosphate
  modified_base 11: mod_base = OTHER; note = 2'-O-methyluridine-3'-phosphate
  modified_base 12: mod_base = OTHER; note = 2'-O-methylcytidine-3'-phosphate
  modified_base 13: mod_base = OTHER; note = 2'-O-methylguanosine-3'-phosphate
  modified_base 14: mod_base = OTHER; note = 2'-deoxy-2'-fluorouridine-3'-phosphate
  modified_base 15: mod_base = OTHER; note = 2'-O-methylcytidine-3'-phosphate
  modified_base 16: mod_base = OTHER; note = 2'-deoxy-2'-fluorouridine-3'-phosphate
  modified_base 17: mod_base = OTHER; note = 2'-O-methyluridine-3'-phosphate
  modified_base 18: mod_base = OTHER; note = 2'-O-methyluridine-3'-phosphate
  modified_base 19: mod_base = OTHER; note = 2'-O-methylcytidine-3'-phosphate
  modified_base 20: mod_base = OTHER; note = 2'-O-methyluridine-3'-phosphate
  modified_base 21: mod_base = OTHER; note = 2'-O-methyluridine-3'-phosphorothioate
  modified_base 22: mod_base = OTHER; note = 2'-O-methylcytidine-3'-phosphorothioate
  modified_base 23: mod_base = OTHER; note = 2'-O-methyluridine
taggtaaagctcgtctttcttct

SEQ ID NO: 666 - RNA, 23 nt, synthetic construct
  source 1..23: mol_type = other RNA
  modified_base 1: mod_base = OTHER; note = 2'-O-methyluridine-3'-phosphorothioate 5'-(E)-Vinylphosphonate
  modified_base 2: mod_base = OTHER; note = 2'-deoxy-2'-fluorouridine-3'-phosphorothioate
  modified_base 3: mod_base = OTHER; note = 2'-O-methylcytidine-3'-phosphate
  modified_base 4: mod_base = OTHER; note = 2'-O-methyladenosine-3'-phosphate
  modified_base 5: mod_base = OTHER; note = 2'-O-methylcytidine-3'-phosphate
  modified_base 6: mod_base = OTHER; note = 2'-deoxy-2'-fluoroadenosine-3'-phosphate
  modified_base 7: mod_base = OTHER; note = 2'-O-methyladenosine-3'-phosphate
  modified_base 8: mod_base = OTHER; note = 2'-deoxy-2'-fluorouridine-3'-phosphate
  modified_base 9: mod_base = OTHER; note = 2'-deoxy-2'-fluoroadenosine-3'-phosphate
  modified_base 10: mod_base = OTHER; note = 2'-O-methyluridine-3'-phosphate
  modified_base 11: mod_base = OTHER; note = 2'-O-methyluridine-3'-phosphate
  modified_base 12: mod_base = OTHER; note = 2'-O-methylguanosine-3'-phosphate
  modified_base 13: mod_base = OTHER; note = 2'-O-methylcytidine-3'-phosphate
  modified_base 14: mod_base = OTHER; note = 2'-deoxy-2'-fluoroadenosine-3'-phosphate
  modified_base 15: mod_base = OTHER; note = 2'-O-methylguanosine-3'-phosphate
  modified_base 16: mod_base = OTHER; note = 2'-deoxy-2'-fluorouridine-3'-phosphate
  modified_base 17: mod_base = OTHER; note = 2'-O-methylguanosine-3'-phosphate
  modified_base 18: mod_base = OTHER; note = 2'-O-methylguanosine-3'-phosphate
  modified_base 19: mod_base = OTHER; note = 2'-O-methyluridine-3'-phosphate
  modified_base 20: mod_base = OTHER; note = 2'-O-methylcytidine-3'-phosphate
  modified_base 21: mod_base = OTHER; note = 2'-O-methylcytidine-3'-phosphorothioate
  modified_base 22: mod_base = OTHER; note = 2'-O-methyladenosine-3'-phosphorothioate
  modified_base 23: mod_base = OTHER; note = 2'-O-methylguanosine
ttcacaatattgcagtggtccag

SEQ ID NO: 667 - RNA, 23 nt, synthetic construct
  source 1..23: mol_type = other RNA
  modified_base 1: mod_base = OTHER; note = 2'-O-methyluridine-3'-phosphorothioate 5'-(E)-Vinylphosphonate
  modified_base 2: mod_base = OTHER; note = 2'-deoxy-2'-fluoroadenosine-3'-phosphorothioate
  modified_base 3: mod_base = OTHER; note = 2'-O-methylguanosine-3'-phosphate
  modified_base 4: mod_base = OTHER; note = 2'-O-methyladenosine-3'-phosphate
  modified_base 5: mod_base = OTHER; note = 2'-O-methyluridine-3'-phosphate
  modified_base 6: mod_base = OTHER; note = 2'-deoxy-2'-fluorouridine-3'-phosphate
  modified_base 7: mod_base = OTHER; note = 2'-O-methyluridine-3'-phosphate
  modified_base 8: mod_base = OTHER; note = 2'-deoxy-2'-fluoroadenosine-3'-phosphate
  modified_base 9: mod_base = OTHER; note = 2'-deoxy-2'-fluoroguanosine-3'-phosphate
  modified_base 10: mod_base = OTHER; note = 2'-O-methylguanosine-3'-phosphate
  modified_base 11: mod_base = OTHER; note = 2'-O-methyluridine-3'-phosphate
  modified_base 12: mod_base = OTHER; note = 2'-O-methyladenosine-3'-phosphate
  modified_base 13: mod_base = OTHER; note = 2'-O-methyladenosine-3'-phosphate
  modified_base 14: mod_base = OTHER; note = 2'-deoxy-2'-fluoroadenosine-3'-phosphate
  modified_base 15: mod_base = OTHER; note = 2'-O-methylguanosine-3'-phosphate
  modified_base 16: mod_base = OTHER; note = 2'-deoxy-2'-fluorocytidine-3'-phosphate
  modified_base 17: mod_base = OTHER; note = 2'-O-methyluridine-3'-phosphate
  modified_base 18: mod_base = OTHER; note = 2'-O-methylcytidine-3'-phosphate
  modified_base 19: mod_base = OTHER; note = 2'-O-methylguanosine-3'-phosphate
  modified_base 20: mod_base = OTHER; note = 2'-O-methyluridine-3'-phosphate
  modified_base 21: mod_base = OTHER; note = 2'-O-methylcytidine-3'-phosphorothioate
  modified_base 22: mod_base = OTHER; note = 2'-O-methyluridine-3'-phosphorothioate
  modified_base 23: mod_base = OTHER; note = 2'-O-methyluridine
tagatttaggtaaagctcgtctt

SEQ ID NO: 668 - RNA, 23 nt, synthetic construct
  source 1..23: mol_type = other RNA
  modified_base 1: mod_base = OTHER; note = 2'-O-methyluridine-3'-phosphorothioate 5'-(E)-Vinylphosphonate
  modified_base 2: mod_base = OTHER; note = 2'-deoxy-2'-fluoroadenosine-3'-phosphorothioate
  modified_base 3: mod_base = OTHER; note = 2'-O-methylguanosine-3'-phosphate
  modified_base 4: mod_base = OTHER; note = 2'-O-methylcytidine-3'-phosphate
  modified_base 5: mod_base = OTHER; note = 2'-O-methyladenosine-3'-phosphate
  modified_base 6: mod_base = OTHER; note = 2'-deoxy-2'-fluorocytidine-3'-phosphate
  modified_base 7: mod_base = OTHER; note = 2'-O-methylcytidine-3'-phosphate
  modified_base 8: mod_base = OTHER; note = 2'-deoxy-2'-fluoroadenosine-3'-phosphate
  modified_base 9: mod_base = OTHER; note = 2'-deoxy-2'-fluoroguanosine-3'-phosphate
  modified_base 10: mod_base = OTHER; note = 2'-O-methyladenosine-3'-phosphate
  modified_base 11: mod_base = OTHER; note = 2'-O-methyluridine-3'-phosphate
  modified_base 12: mod_base = OTHER; note = 2'-O-methyluridine-3'-phosphate
  modified_base 13: mod_base = OTHER; note = 2'-O-methyluridine-3'-phosphate
  modified_base 14: mod_base = OTHER; note = 2'-deoxy-2'-fluoroadenosine-3'-phosphate
  modified_base 15: mod_base = OTHER; note = 2'-O-methylguanosine-3'-phosphate
  modified_base 16: mod_base = OTHER; note = 2'-deoxy-2'-fluoroguanosine-3'-phosphate
  modified_base 17: mod_base = OTHER; note = 2'-O-methyluridine-3'-phosphate
  modified_base 18: mod_base = OTHER; note = 2'-O-methyladenosine-3'-phosphate
  modified_base 19: mod_base = OTHER; note = 2'-O-methyladenosine-3'-phosphate
  modified_base 20: mod_base = OTHER; note = 2'-O-methyladenosine-3'-phosphate
  modified_base 21: mod_base = OTHER; note = 2'-O-methylguanosine-3'-phosphorothioate
  modified_base 22: mod_base = OTHER; note = 2'-O-methylcytidine-3'-phosphorothioate
  modified_base 23: mod_base = OTHER; note = 2'-O-methyluridine
tagcaccagatttaggtaaagct

SEQ ID NO: 669 - RNA, 23 nt, synthetic construct
  source 1..23: mol_type = other RNA
  modified_base 1: mod_base = OTHER; note = 2'-O-methyluridine-3'-phosphorothioate 5'-(E)-Vinylphosphonate
  modified_base 2: mod_base = OTHER; note = 2'-deoxy-2'-fluorouridine-3'-phosphorothioate
  modified_base 3: mod_base = OTHER; note = 2'-O-methyladenosine-3'-phosphate
  modified_base 4: mod_base = OTHER; note = 2'-O-methyluridine-3'-phosphate
  modified_base 5: mod_base = OTHER; note = 2'-O-methyluridine-3'-phosphate
  modified_base 6: mod_base = OTHER; note = 2'-deoxy-2'-fluorocytidine-3'-phosphate
  modified_base 7: mod_base = OTHER; note = 2'-O-methylcytidine-3'-phosphate
  modified_base 8: mod_base = OTHER; note = 2'-deoxy-2'-fluoroadenosine-3'-phosphate
  modified_base 9: mod_base = OTHER; note = 2'-deoxy-2'-fluoroguanosine-3'-phosphate
  modified_base 10: mod_base = OTHER; note = 2'-O-methylcytidine-3'-phosphate
  modified_base 11: mod_base = OTHER; note = 2'-O-methyladenosine-3'-phosphate
  modified_base 12: mod_base = OTHER; note = 2'-O-methylcytidine-3'-phosphate
  modified_base 13: mod_base = OTHER; note = 2'-O-methylcytidine-3'-phosphate
  modified_base 14: mod_base = OTHER; note = 2'-deoxy-2'-fluoroadenosine-3'-phosphate
  modified_base 15: mod_base = OTHER; note = 2'-O-methylguanosine-3'-phosphate
  modified_base 16: mod_base = OTHER; note = 2'-deoxy-2'-fluoroadenosine-3'-phosphate
  modified_base 17: mod_base = OTHER; note = 2'-O-methyluridine-3'-phosphate
  modified_base 18: mod_base = OTHER; note = 2'-O-methyluridine-3'-phosphate
  modified_base 19: mod_base = OTHER; note = 2'-O-methyluridine-3'-phosphate
  modified_base 20: mod_base = OTHER; note = 2'-O-methyladenosine-3'-phosphate
  modified_base 21: mod_base = OTHER; note = 2'-O-methylguanosine-3'-phosphorothioate
  modified_base 22: mod_base = OTHER; note = 2'-O-methylguanosine-3'-phosphorothioate
  modified_base 23: mod_base = OTHER; note = 2'-O-methyluridine
ttattccagcaccagatttaggt

SEQ ID NO: 670 - RNA, 23 nt, synthetic construct
  source 1..23: mol_type = other RNA
  modified_base 1: mod_base = OTHER; note = 2'-O-methyluridine-3'-phosphorothioate 5'-(E)-Vinylphosphonate
  modified_base 2: mod_base = OTHER; note = 2'-deoxy-2'-fluorouridine-3'-phosphorothioate
  modified_base 3: mod_base = OTHER; note = 2'-O-methylcytidine-3'-phosphate
  modified_base 4: mod_base = OTHER; note = 2'-O-methyluridine-3'-phosphate
  modified_base 5: mod_base = OTHER; note = 2'-O-methylcytidine-3'-phosphate
  modified_base 6: mod_base = OTHER; note = 2'-deoxy-2'-fluoroguanosine-3'-phosphate
  modified_base 7: mod_base = OTHER; note = 2'-O-methylguanosine-3'-phosphate
  modified_base 8: mod_base = OTHER; note = 2'-deoxy-2'-fluoroguanosine-3'-phosphate
  modified_base 9: mod_base = OTHER; note = 2'-deoxy-2'-fluorocytidine-3'-phosphate
  modified_base 10: mod_base = OTHER; note = 2'-O-methyladenosine-3'-phosphate
  modified_base 11: mod_base = OTHER; note = 2'-O-methylcytidine-3'-phosphate
  modified_base 12: mod_base = OTHER; note = 2'-O-methyladenosine-3'-phosphate
  modified_base 13: mod_base = OTHER; note = 2'-O-methyluridine-3'-phosphate
  modified_base 14: mod_base = OTHER; note = 2'-deoxy-2'-fluoroadenosine-3'-phosphate
  modified_base 15: mod_base = OTHER; note = 2'-O-methyluridine-3'-phosphate
  modified_base 16: mod_base = OTHER; note = 2'-deoxy-2'-fluorouridine-3'-phosphate
  modified_base 17: mod_base = OTHER; note = 2'-O-methylcytidine-3'-phosphate
  modified_base 18: mod_base = OTHER; note = 2'-O-methylcytidine-3'-phosphate
  modified_base 19: mod_base = OTHER; note = 2'-O-methyladenosine-3'-phosphate
  modified_base 20: mod_base = OTHER; note = 2'-O-methylguanosine-3'-phosphate
  modified_base 21: mod_base = OTHER; note = 2'-O-methylcytidine-3'-phosphorothioate
  modified_base 22: mod_base = OTHER; note = 2'-O-methyladenosine-3'-phosphorothioate
  modified_base 23: mod_base = OTHER; note = 2'-O-methylcytidine
ttctcgggcacatattccagcac

SEQ ID NO: 671 - RNA, 23 nt, synthetic construct
  source 1..23: mol_type = other RNA
  modified_base 1: mod_base = OTHER; note = 2'-O-methyluridine-3'-phosphorothioate 5'-(E)-Vinylphosphonate
  modified_base 2: mod_base = OTHER; note = 2'-deoxy-2'-fluorouridine-3'-phosphorothioate
  modified_base 3: mod_base = OTHER; note = 2'-O-methyladenosine-3'-phosphate
  modified_base 4: mod_base = OTHER; note = 2'-O-methylcytidine-3'-phosphate
  modified_base 5: mod_base = OTHER; note = 2'-O-methyladenosine-3'-phosphate
  modified_base 6: mod_base = OTHER; note = 2'-deoxy-2'-fluorocytidine-3'-phosphate
  modified_base 7: mod_base = OTHER; note = 2'-O-methyluridine-3'-phosphate
  modified_base 8: mod_base = OTHER; note = 2'-deoxy-2'-fluoroguanosine-3'-phosphate
  modified_base 9: mod_base = OTHER; note = 2'-deoxy-2'-fluorouridine-3'-phosphate
  modified_base 10: mod_base = OTHER; note = 2'-O-methylcytidine-3'-phosphate
  modified_base 11: mod_base = OTHER; note = 2'-O-methyluridine-3'-phosphate
  modified_base 12: mod_base = OTHER; note = 2'-O-methylcytidine-3'-phosphate
  modified_base 13: mod_base = OTHER; note = 2'-O-methylguanosine-3'-phosphate
  modified_base 14: mod_base = OTHER; note = 2'-deoxy-2'-fluoroguanosine-3'-phosphate
  modified_base 15: mod_base = OTHER; note = 2'-O-methylguanosine-3'-phosphate
  modified_base 16: mod_base = OTHER; note = 2'-deoxy-2'-fluorocytidine-3'-phosphate
  modified_base 17: mod_base = OTHER; note = 2'-O-methyladenosine-3'-phosphate
  modified_base 18: mod_base = OTHER; note = 2'-O-methylcytidine-3'-phosphate
  modified_base 19: mod_base = OTHER; note = 2'-O-methyladenosine-3'-phosphate
  modified_base 20: mod_base = OTHER; note = 2'-O-methyluridine-3'-phosphate
  modified_base 21: mod_base = OTHER; note = 2'-O-methyladenosine-3'-phosphorothioate
  modified_base 22: mod_base = OTHER; note = 2'-O-methyluridine-3'-phosphorothioate
  modified_base 23: mod_base = OTHER; note = 2'-O-methyluridine
ttacactgtctcgggcacatatt

SEQ ID NO: 672 - RNA, 23 nt, synthetic construct
  source 1..23: mol_type = other RNA
  modified_base 1: mod_base = OTHER; note = 2'-O-methyluridine-3'-phosphorothioate 5'-(E)-Vinylphosphonate
  modified_base 2: mod_base = OTHER; note = 2'-deoxy-2'-fluoroadenosine-3'-phosphorothioate
  modified_base 3: mod_base = OTHER; note = 2'-O-methylcytidine-3'-phosphate
  modified_base 4: mod_base = OTHER; note = 2'-O-methylcytidine-3'-phosphate
  modified_base 5: mod_base = OTHER; note = 2'-O-methylcytidine-3'-phosphate
  modified_base 6: mod_base = OTHER; note = 2'-deoxy-2'-fluoroguanosine-3'-phosphate
  modified_base 7: mod_base = OTHER; note = 2'-O-methylguanosine-3'-phosphate
  modified_base 8: mod_base = OTHER; note = 2'-deoxy-2'-fluorouridine-3'-phosphate
  modified_base 9: mod_base = OTHER; note = 2'-deoxy-2'-fluoroadenosine-3'-phosphate
  modified_base 10: mod_base = OTHER; note = 2'-O-methylcytidine-3'-phosphate
  modified_base 11: mod_base = OTHER; note = 2'-O-methyladenosine-3'-phosphate
  modified_base 12: mod_base = OTHER; note = 2'-O-methylcytidine-3'-phosphate
  modified_base 13: mod_base = OTHER; note = 2'-O-methyluridine-3'-phosphate
  modified_base 14: mod_base = OTHER; note = 2'-deoxy-2'-fluoroguanosine-3'-phosphate
  modified_base 15: mod_base = OTHER; note = 2'-O-methyluridine-3'-phosphate
  modified_base 16: mod_base = OTHER; note = 2'-deoxy-2'-fluorocytidine-3'-phosphate
  modified_base 17: mod_base = OTHER; note = 2'-O-methyluridine-3'-phosphate
  modified_base 18: mod_base = OTHER; note = 2'-O-methylcytidine-3'-phosphate
  modified_base 19: mod_base = OTHER; note = 2'-O-methylguanosine-3'-phosphate
  modified_base 20: mod_base = OTHER; note = 2'-O-methylguanosine-3'-phosphate
  modified_base 21: mod_base = OTHER; note = 2'-O-methylguanosine-3'-phosphorothioate
  modified_base 22: mod_base = OTHER; note = 2'-O-methylcytidine-3'-phosphorothioate
  modified_base 23: mod_base = OTHER; note = 2'-O-methyladenosine
tacccggtacactgtctcgggca

SEQ ID NO: 673 - RNA, 23 nt, synthetic construct
  source 1..23: mol_type = other RNA
  modified_base 1: mod_base = OTHER; note = 2'-O-methyluridine-3'-phosphorothioate 5'-(E)-Vinylphosphonate
  modified_base 2: mod_base = OTHER; note = 2'-deoxy-2'-fluoroguanosine-3'-phosphorothioate
  modified_base 3: mod_base = OTHER; note = 2'-O-methyluridine-3'-phosphate
  modified_base 4: mod_base = OTHER; note = 2'-O-methylcytidine-3'-phosphate
  modified_base 5: mod_base = OTHER; note = 2'-O-methyladenosine-3'-phosphate
  modified_base 6: mod_base = OTHER; note = 2'-deoxy-2'-fluoroadenosine-3'-phosphate
  modified_base 7: mod_base = OTHER; note = 2'-O-methylcytidine-3'-phosphate
  modified_base 8: mod_base = OTHER; note = 2'-deoxy-2'-fluorouridine-3'-phosphate
  modified_base 9: mod_base = OTHER; note = 2'-deoxy-2'-fluorouridine-3'-phosphate
  modified_base 10: mod_base = OTHER; note = 2'-O-methylguanosine-3'-phosphate
  modified_base 11: mod_base = OTHER; note = 2'-O-methylguanosine-3'-phosphate
  modified_base 12: mod_base = OTHER; note = 2'-O-methylcytidine-3'-phosphate
  modified_base 13: mod_base = OTHER; note = 2'-O-methylcytidine-3'-phosphate
  modified_base 14: mod_base = OTHER; note = 2'-deoxy-2'-fluorouridine-3'-phosphate
  modified_base 15: mod_base = OTHER; note = 2'-O-methyluridine-3'-phosphate
  modified_base 16: mod_base = OTHER; note = 2'-deoxy-2'-fluoroguanosine-3'-phosphate
  modified_base 17: mod_base = OTHER; note = 2'-O-methylguanosine-3'-phosphate
  modified_base 18: mod_base = OTHER; note = 2'-O-methyluridine-3'-phosphate
  modified_base 19: mod_base = OTHER; note = 2'-O-methylguanosine-3'-phosphate
  modified_base 20: mod_base = OTHER; note = 2'-O-methyladenosine-3'-phosphate
  modified_base 21: mod_base = OTHER; note = 2'-O-methyladenosine-3'-phosphorothioate
  modified_base 22: mod_base = OTHER; note = 2'-O-methylguanosine-3'-phosphorothioate
  modified_base 23: mod_base = OTHER; note = 2'-O-methyluridine
tgtcaacttggccttggtgaagt

SEQ ID NO: 674 - RNA, 23 nt, synthetic construct
  source 1..23: mol_type = other RNA
  modified_base 1: mod_base = OTHER; note = 2'-O-methyluridine-3'-phosphorothioate 5'-(E)-Vinylphosphonate
  modified_base 2: mod_base = OTHER; note = 2'-deoxy-2'-fluorouridine-3'-phosphorothioate
  modified_base 3: mod_base = OTHER; note = 2'-O-methyladenosine-3'-phosphate
  modified_base 4: mod_base = OTHER; note = 2'-O-methylguanosine-3'-phosphate
  modified_base 5: mod_base = OTHER; note = 2'-O-methylguanosine-3'-phosphate
  modified_base 6: mod_base = OTHER; note = 2'-deoxy-2'-fluoroguanosine-3'-phosphate
  modified_base 7: mod_base = OTHER; note = 2'-O-methyladenosine-3'-phosphate
  modified_base 8: mod_base = OTHER; note = 2'-deoxy-2'-fluorouridine-3'-phosphate
  modified_base 9: mod_base = OTHER; note = 2'-deoxy-2'-fluoroguanosine-3'-phosphate
  modified_base 10: mod_base = OTHER; note = 2'-O-methylguanosine-3'-phosphate
  modified_base 11: mod_base = OTHER; note = 2'-O-methyluridine-3'-phosphate
  modified_base 12: mod_base = OTHER; note = 2'-O-methylcytidine-3'-phosphate
  modified_base 13: mod_base = OTHER; note = 2'-O-methyladenosine-3'-phosphate
  modified_base 14: mod_base = OTHER; note = 2'-deoxy-2'-fluoroadenosine-3'-phosphate
  modified_base 15: mod_base = OTHER; note = 2'-O-methylcytidine-3'-phosphate
  modified_base 16: mod_base = OTHER; note = 2'-deoxy-2'-fluorouridine-3'-phosphate
  modified_base 17: mod_base = OTHER; note = 2'-O-methyluridine-3'-phosphate
  modified_base 18: mod_base = OTHER; note = 2'-O-methylguanosine-3'-phosphate
  modified_base 19: mod_base = OTHER; note = 2'-O-methylguanosine-3'-phosphate
  modified_base 20: mod_base = OTHER; note = 2'-O-methylcytidine-3'-phosphate
  modified_base 21: mod_base = OTHER; note = 2'-O-methylcytidine-3'-phosphorothioate
  modified_base 22: mod_base = OTHER; note = 2'-O-methyluridine-3'-phosphorothioate
  modified_base 23: mod_base = OTHER; note = 2'-O-methyluridine
ttagggatggtcaacttggcctt

SEQ ID NO: 675 - RNA, 23 nt, synthetic construct
  source 1..23: mol_type = other RNA
  modified_base 1: mod_base = OTHER; note = 2'-O-methyluridine-3'-phosphorothioate 5'-(E)-Vinylphosphonate
  modified_base 2: mod_base = OTHER; note = 2'-deoxy-2'-fluorouridine-3'-phosphorothioate
  modified_base 3: mod_base = OTHER; note = 2'-O-methyladenosine-3'-phosphate
  modified_base 4: mod_base = OTHER; note = 2'-O-methylguanosine-3'-phosphate
  modified_base 5: mod_base = OTHER; note = 2'-O-methyladenosine-3'-phosphate
  modified_base 6: mod_base = OTHER; note = 2'-deoxy-2'-fluoroguanosine-3'-phosphate
  modified_base 7: mod_base = OTHER; note = 2'-O-methylguanosine-3'-phosphate
  modified_base 8: mod_base = OTHER; note = 2'-deoxy-2'-fluoroadenosine-3'-phosphate
  modified_base 9: mod_base = OTHER; note = 2'-deoxy-2'-fluorouridine-3'-phosphate
  modified_base 10: mod_base = OTHER; note = 2'-O-methyladenosine-3'-phosphate
  modified_base 11: mod_base = OTHER; note = 2'-O-methylguanosine-3'-phosphate
  modified_base 12: mod_base = OTHER; note = 2'-O-methylguanosine-3'-phosphate
  modified_base 13: mod_base = OTHER; note = 2'-O-methylguanosine-3'-phosphate
  modified_base 14: mod_base = OTHER; note = 2'-deoxy-2'-fluoroadenosine-3'-phosphate
  modified_base 15: mod_base = OTHER; note = 2'-O-methyluridine-3'-phosphate
  modified_base 16: mod_base = OTHER; note = 2'-deoxy-2'-fluoroguanosine-3'-phosphate
  modified_base 17: mod_base = OTHER; note = 2'-O-methylguanosine-3'-phosphate
  modified_base 18: mod_base = OTHER; note = 2'-O-methyluridine-3'-phosphate
  modified_base 19: mod_base = OTHER; note = 2'-O-methylcytidine-3'-phosphate
  modified_base 20: mod_base = OTHER; note = 2'-O-methyladenosine-3'-phosphate
  modified_base 21: mod_base = OTHER; note = 2'-O-methyladenosine-3'-phosphorothioate
  modified_base 22: mod_base = OTHER; note = 2'-O-methylcytidine-3'-phosphorothioate
  modified_base 23: mod_base = OTHER; note = 2'-O-methyluridine
ttagaggatagggatggtcaact

SEQ ID NO: 676 - RNA, 23 nt, synthetic construct
  source 1..23: mol_type = other RNA
  modified_base 1: mod_base = OTHER; note = 2'-O-methyluridine-3'-phosphorothioate 5'-(E)-Vinylphosphonate
  modified_base 2: mod_base = OTHER; note = 2'-deoxy-2'-fluorouridine-3'-phosphorothioate
  modified_base 3: mod_base = OTHER; note = 2'-O-methyluridine-3'-phosphate
  modified_base 4: mod_base = OTHER; note = 2'-O-methylguanosine-3'-phosphate
  modified_base 5: mod_base = OTHER; note = 2'-O-methyladenosine-3'-phosphate
  modified_base 6: mod_base = OTHER; note = 2'-deoxy-2'-fluorocytidine-3'-phosphate
  modified_base 7: mod_base = OTHER; note = 2'-O-methyladenosine-3'-phosphate
  modified_base 8: mod_base = OTHER; note = 2'-deoxy-2'-fluorouridine-3'-phosphate
  modified_base 9: mod_base = OTHER; note = 2'-deoxy-2'-fluoroadenosine-3'-phosphate
  modified_base 10: mod_base = OTHER; note = 2'-O-methylguanosine-3'-phosphate
  modified_base 11: mod_base = OTHER; note = 2'-O-methyladenosine-3'-phosphate
  modified_base 12: mod_base = OTHER; note = 2'-O-methylguanosine-3'-phosphate
  modified_base 13: mod_base = OTHER; note = 2'-O-methylguanosine-3'-phosphate
  modified_base 14: mod_base = OTHER; note = 2'-deoxy-2'-fluoroadenosine-3'-phosphate
  modified_base 15: mod_base = OTHER; note = 2'-O-methyluridine-3'-phosphate
  modified_base 16: mod_base = OTHER; note = 2'-deoxy-2'-fluoroadenosine-3'-phosphate
  modified_base 17: mod_base = OTHER; note = 2'-O-methylguanosine-3'-phosphate
  modified_base 18: mod_base = OTHER; note = 2'-O-methylguanosine-3'-phosphate
  modified_base 19: mod_base = OTHER; note = 2'-O-methylguanosine-3'-phosphate
  modified_base 20: mod_base = OTHER; note = 2'-O-methyladenosine-3'-phosphate
  modified_base 21: mod_base = OTHER; note = 2'-O-methyluridine-3'-phosphorothioate
  modified_base 22: mod_base = OTHER; note = 2'-O-methylguanosine-3'-phosphorothioate
  modified_base 23: mod_base = OTHER; note = 2'-O-methylguanosine
tttgacatagaggatagggatgg

SEQ ID NO: 677 - RNA, 23 nt, synthetic construct
  source 1..23: mol_type = other RNA
  modified_base 1: mod_base = OTHER; note = 2'-O-methyluridine-3'-phosphorothioate 5'-(E)-Vinylphosphonate
  modified_base 2: mod_base = OTHER; note = 2'-deoxy-2'-fluoroadenosine-3'-phosphorothioate
  modified_base 3: mod_base = OTHER; note = 2'-O-methyluridine-3'-phosphate
  modified_base 4: mod_base = OTHER; note = 2'-O-methylguanosine-3'-phosphate
  modified_base 5: mod_base = OTHER; note = 2'-O-methyluridine-3'-phosphate
  modified_base 6: mod_base = OTHER; note = 2'-deoxy-2'-fluoroadenosine-3'-phosphate
  modified_base 7: mod_base = OTHER; note = 2'-O-methylcytidine-3'-phosphate
  modified_base 8: mod_base = OTHER; note = 2'-deoxy-2'-fluoroadenosine-3'-phosphate
  modified_base 9: mod_base = OTHER; note = 2'-deoxy-2'-fluorocytidine-3'-phosphate
  modified_base 10: mod_base = OTHER; note = 2'-O-methylcytidine-3'-phosphate
  modified_base 11: mod_base = OTHER; note = 2'-O-methyluridine-3'-phosphate
  modified_base 12: mod_base = OTHER; note = 2'-O-methyluridine-3'-phosphate
  modified_base 13: mod_base = OTHER; note = 2'-O-methylguanosine-3'-phosphate
  modified_base 14: mod_base = OTHER; note = 2'-deoxy-2'-fluoroadenosine-3'-phosphate
  modified_base 15: mod_base = OTHER; note = 2'-O-methylcytidine-3'-phosphate
  modified_base 16: mod_base = OTHER; note = 2'-deoxy-2'-fluoroadenosine-3'-phosphate
  modified_base 17: mod_base = OTHER; note = 2'-O-methyluridine-3'-phosphate
  modified_base 18: mod_base = OTHER; note = 2'-O-methyladenosine-3'-phosphate
  modified_base 19: mod_base = OTHER; note = 2'-O-methylguanosine-3'-phosphate
  modified_base 20: mod_base = OTHER; note = 2'-O-methyladenosine-3'-phosphate
  modified_base 21: mod_base = OTHER; note = 2'-O-methylguanosine-3'-phosphorothioate
  modified_base 22: mod_base = OTHER; note = 2'-O-methylguanosine-3'-phosphorothioate
  modified_base 23: mod_base = OTHER; note = 2'-O-methyladenosine
tatgtacaccttgacatagagga

SEQ ID NO: 678 - RNA, 23 nt, synthetic construct
  source 1..23: mol_type = other RNA
  modified_base 1: mod_base = OTHER; note = 2'-O-methyluridine-3'-phosphorothioate 5'-(E)-Vinylphosphonate
  modified_base 2: mod_base = OTHER; note = 2'-deoxy-2'-fluorouridine-3'-phosphorothioate
  modified_base 3: mod_base = OTHER; note = 2'-O-methylguanosine-3'-phosphate
  modified_base 4: mod_base = OTHER; note = 2'-O-methylguanosine-3'-phosphate
  modified_base 5: mod_base = OTHER; note = 2'-O-methyluridine-3'-phosphate
  modified_base 6: mod_base = OTHER; note = 2'-deoxy-2'-fluoroadenosine-3'-phosphate
  modified_base 7: mod_base = OTHER; note = 2'-O-methylcytidine-3'-phosphate
  modified_base 8: mod_base = OTHER; note = 2'-deoxy-2'-fluoroadenosine-3'-phosphate
  modified_base 9: mod_base = OTHER; note = 2'-deoxy-2'-fluorouridine-3'-phosphate
  modified_base 10: mod_base = OTHER; note = 2'-O-methylguanosine-3'-phosphate
  modified_base 11: mod_base = OTHER; note = 2'-O-methyluridine-3'-phosphate
  modified_base 12: mod_base = OTHER; note = 2'-O-methyladenosine-3'-phosphate
  modified_base 13: mod_base = OTHER; note = 2'-O-methylcytidine-3'-phosphate
  modified_base 14: mod_base = OTHER; note = 2'-deoxy-2'-fluoroadenosine-3'-phosphate
  modified_base 15: mod_base = OTHER; note = 2'-O-methylcytidine-3'-phosphate
  modified_base 16: mod_base = OTHER; note = 2'-deoxy-2'-fluorocytidine-3'-phosphate
  modified_base 17: mod_base = OTHER; note = 2'-O-methyluridine-3'-phosphate
  modified_base 18: mod_base = OTHER; note = 2'-O-methyluridine-3'-phosphate
  modified_base 19: mod_base = OTHER; note = 2'-O-methylguanosine-3'-phosphate
  modified_base 20: mod_base = OTHER; note = 2'-O-methyladenosine-3'-phosphate
  modified_base 21: mod_base = OTHER; note = 2'-O-methylcytidine-3'-phosphorothioate
  modified_base 22: mod_base = OTHER; note = 2'-O-methyladenosine-3'-phosphorothioate
  modified_base 23: mod_base = OTHER; note = 2'-O-methyluridine
ttggtacatgtacaccttgacat

SEQ ID NO: 679 - RNA, 23 nt, synthetic construct
  source 1..23: mol_type = other RNA
  modified_base 1: mod_base = OTHER; note = 2'-O-methyluridine-3'-phosphorothioate 5'-(E)-Vinylphosphonate
  modified_base 2: mod_base = OTHER; note = 2'-deoxy-2'-fluorouridine-3'-phosphorothioate
  modified_base 3: mod_base = OTHER; note = 2'-O-methyluridine-3'-phosphate
  modified_base 4: mod_base = OTHER; note = 2'-O-methylguanosine-3'-phosphate
  modified_base 5: mod_base = OTHER; note = 2'-O-methylguanosine-3'-phosphate
  modified_base 6: mod_base = OTHER; note = 2'-deoxy-2'-fluorocytidine-3'-phosphate
  modified_base 7: mod_base = OTHER; note = 2'-O-methylcytidine-3'-phosphate
  modified_base 8: mod_base = OTHER; note = 2'-deoxy-2'-fluorouridine-3'-phosphate
  modified_base 9: mod_base = OTHER; note = 2'-deoxy-2'-fluorouridine-3'-phosphate
  modified_base 10: mod_base = OTHER; note = 2'-O-methylguanosine-3'-phosphate
  modified_base 11: mod_base = OTHER; note = 2'-O-methylguanosine-3'-phosphate
  modified_base 12: mod_base = OTHER; note = 2'-O-methyluridine-3'-phosphate
  modified_base 13: mod_base = OTHER; note = 2'-O-methylguanosine-3'-phosphate
  modified_base 14: mod_base = OTHER; note = 2'-deoxy-2'-fluoroadenosine-3'-phosphate
  modified_base 15: mod_base = OTHER; note = 2'-O-methyladenosine-3'-phosphate
  modified_base 16: mod_base = OTHER; note = 2'-deoxy-2'-fluoroguanosine-3'-phosphate
  modified_base 17: mod_base = OTHER; note = 2'-O-methyluridine-3'-phosphate
  modified_base 18: mod_base = OTHER; note = 2'-O-methylguanosine-3'-phosphate
  modified_base 19: mod_base = OTHER; note = 2'-O-methylguanosine-3'-phosphate
  modified_base 20: mod_base = OTHER; note = 2'-O-methylcytidine-3'-phosphate
  modified_base 21: mod_base = OTHER; note = 2'-O-methylguanosine-3'-phosphorothioate
  modified_base 22: mod_base = OTHER; note = 2'-O-methylguanosine-3'-phosphorothioate
  modified_base 23: mod_base = OTHER; note = 2'-O-methylguanosine
tttggccttggtgaagtggcggg

SEQ ID NO: 680 - RNA, 23 nt, synthetic construct
  source 1..23: mol_type = other RNA
  modified_base 1: mod_base = OTHER; note = 2'-O-methyluridine-3'-phosphorothioate 5'-(E)-Vinylphosphonate
  modified_base 2: mod_base = OTHER; note = 2'-deoxy-2'-fluoroadenosine-3'-phosphorothioate
  modified_base 3: mod_base = OTHER; note = 2'-O-methyladenosine-3'-phosphate
  modified_base 4: mod_base = OTHER; note = 2'-O-methylguanosine-3'-phosphate
  modified_base 5: mod_base = OTHER; note = 2'-O-methylcytidine-3'-phosphate
  modified_base 6: mod_base = OTHER; note = 2'-deoxy-2'-fluorouridine-3'-phosphate
  modified_base 7: mod_base = OTHER; note = 2'-O-methylguanosine-3'-phosphate
  modified_base 8: mod_base = OTHER; note = 2'-deoxy-2'-fluorocytidine-3'-phosphate
  modified_base 9: mod_base = OTHER; note = 2'-deoxy-2'-fluoroguanosine-3'-phosphate
  modified_base 10: mod_base = OTHER; note = 2'-O-methylguanosine-3'-phosphate
  modified_base 11: mod_base = OTHER; note = 2'-O-methyladenosine-3'-phosphate
  modified_base 12: mod_base = OTHER; note = 2'-O-methyladenosine-3'-phosphate
  modified_base 13: mod_base = OTHER; note = 2'-O-methylguanosine-3'-phosphate
  modified_base 14: mod_base = OTHER; note = 2'-deoxy-2'-fluoroadenosine-3'-phosphate
  modified_base 15: mod_base = OTHER; note = 2'-O-methylguanosine-3'-phosphate
  modified_base 16: mod_base = OTHER; note = 2'-deoxy-2'-fluorocytidine-3'-phosphate
  modified_base 17: mod_base = OTHER; note = 2'-O-methyluridine-3'-phosphate
  modified_base 18: mod_base = OTHER; note = 2'-O-methylguanosine-3'-phosphate
  modified_base 19: mod_base = OTHER; note = 2'-O-methylguanosine-3'-phosphate
  modified_base 20: mod_base = OTHER; note = 2'-O-methyluridine-3'-phosphate
  modified_base 21: mod_base = OTHER; note = 2'-O-methyladenosine-3'-phosphorothioate
  modified_base 22: mod_base = OTHER; note = 2'-O-methylcytidine-3'-phosphorothioate
  modified_base 23: mod_base = OTHER; note = 2'-O-methyladenosine
taagctgcggaagagctggtaca

SEQ ID NO: 681 - RNA, 23 nt, synthetic construct
  source 1..23: mol_type = other RNA
  modified_base 1: mod_base = OTHER; note = 2'-O-methyluridine-3'-phosphorothioate 5'-(E)-Vinylphosphonate
  modified_base 2: mod_base = OTHER; note = 2'-deoxy-2'-fluorouridine-3'-phosphorothioate
  modified_base 3: mod_base = OTHER; note = 2'-O-methylguanosine-3'-phosphate
  modified_base 4: mod_base = OTHER; note = 2'-O-methyluridine-3'-phosphate
  modified_base 5: mod_base = OTHER; note = 2'-O-methyladenosine-3'-phosphate
  modified_base 6: mod_base = OTHER; note = 2'-deoxy-2'-fluoroguanosine-3'-phosphate
  modified_base 7: mod_base = OTHER; note = 2'-O-methylguanosine-3'-phosphate
  modified_base 8: mod_base = OTHER; note = 2'-deoxy-2'-fluorocytidine-3'-phosphate
  modified_base 9: mod_base = OTHER; note = 2'-deoxy-2'-fluorocytidine-3'-phosphate
  modified_base 10: mod_base = OTHER; note = 2'-O-methyladenosine-3'-phosphate
  modified_base 11: mod_base = OTHER; note = 2'-O-methyladenosine-3'-phosphate
  modified_base 12: mod_base = OTHER; note = 2'-O-methylguanosine-3'-phosphate
  modified_base 13: mod_base = OTHER; note = 2'-O-methylcytidine-3'-phosphate
  modified_base 14: mod_base = OTHER; note = 2'-deoxy-2'-fluorouridine-3'-phosphate
  modified_base 15: mod_base = OTHER; note = 2'-O-methylguanosine-3'-phosphate
  modified_base 16: mod_base = OTHER; note = 2'-deoxy-2'-fluorocytidine-3'-phosphate
  modified_base 17: mod_base = OTHER; note = 2'-O-methylguanosine-3'-phosphate
  modified_base 18: mod_base = OTHER; note = 2'-O-methylguanosine-3'-phosphate
  modified_base 19: mod_base = OTHER; note = 2'-O-methyladenosine-3'-phosphate
  modified_base 20: mod_base = OTHER; note = 2'-O-methyladenosine-3'-phosphate
  modified_base 21: mod_base = OTHER; note = 2'-O-methylguanosine-3'-phosphorothioate
  modified_base 22: mod_base = OTHER; note = 2'-O-methyladenosine-3'-phosphorothioate
  modified_base 23: mod_base = OTHER; note = 2'-O-methylguanosine
ttgtaggccaagctgcggaagag

SEQ ID NO: 682 - RNA, 23 nt, synthetic construct
  source 1..23: mol_type = other RNA
  modified_base 1: mod_base = OTHER; note = 2'-O-methyluridine-3'-phosphorothioate 5'-(E)-Vinylphosphonate
  modified_base 2: mod_base = OTHER; note = 2'-deoxy-2'-fluoroadenosine-3'-phosphorothioate
  modified_base 3: mod_base = OTHER; note = 2'-O-methyluridine-3'-phosphate
  modified_base 4: mod_base = OTHER; note = 2'-O-methylguanosine-3'-phosphate
  modified_base 5: mod_base = OTHER; note = 2'-O-methyluridine-3'-phosphate
  modified_base 6: mod_base = OTHER; note = 2'-deoxy-2'-fluorocytidine-3'-phosphate
  modified_base 7: mod_base = OTHER; note = 2'-O-methylguanosine-3'-phosphate
  modified_base 8: mod_base = OTHER; note = 2'-deoxy-2'-fluorocytidine-3'-phosphate
  modified_base 9: mod_base = OTHER; note = 2'-deoxy-2'-fluoroguanosine-3'-phosphate
  modified_base 10: mod_base = OTHER; note = 2'-O-methylguanosine-3'-phosphate
  modified_base 11: mod_base = OTHER; note = 2'-O-methyluridine-3'-phosphate
  modified_base 12: mod_base = OTHER; note = 2'-O-methylguanosine-3'-phosphate
  modified_base 13: mod_base = OTHER; note = 2'-O-methyladenosine-3'-phosphate
  modified_base 14: mod_base = OTHER; note = 2'-deoxy-2'-fluorocytidine-3'-phosphate
  modified_base 15: mod_base = OTHER; note = 2'-O-methyladenosine-3'-phosphate
  modified_base 16: mod_base = OTHER; note = 2'-deoxy-2'-fluorocytidine-3'-phosphate
  modified_base 17: mod_base = OTHER; note = 2'-O-methyladenosine-3'-phosphate
  modified_base 18: mod_base = OTHER; note = 2'-O-methylcytidine-3'-phosphate
  modified_base 19: mod_base = OTHER; note = 2'-O-methylguanosine-3'-phosphate
  modified_base 20: mod_base = OTHER; note = 2'-O-methylcytidine-3'-phosphate
  modified_base 21: mod_base = OTHER; note = 2'-O-methylcytidine-3'-phosphorothioate
  modified_base 22: mod_base = OTHER; note = 2'-O-methylcytidine-3'-phosphorothioate
  modified_base 23: mod_base = OTHER; note = 2'-O-methyluridine
tatgtcgcggtgacacacgccct

SEQ ID NO: 683 - RNA, 23 nt, synthetic construct
  source 1..23: mol_type = other RNA
  modified_base 1: mod_base = OTHER; note = 2'-O-methyluridine-3'-phosphorothioate 5'-(E)-Vinylphosphonate
  modified_base 2: mod_base = OTHER; note = 2'-deoxy-2'-fluoroadenosine-3'-phosphorothioate
  modified_base 3: mod_base = OTHER; note = 2'-O-methyladenosine-3'-phosphate
  modified_base 4: mod_base = OTHER; note = 2'-O-methylguanosine-3'-phosphate
  modified_base 5: mod_base = OTHER; note = 2'-O-methyladenosine-3'-phosphate
  modified_base 6: mod_base = OTHER; note = 2'-deoxy-2'-fluoroguanosine-3'-phosphate
  modified_base 7: mod_base = OTHER; note = 2'-O-methylcytidine-3'-phosphate
  modified_base 8: mod_base = OTHER; note = 2'-deoxy-2'-fluorouridine-3'-phosphate
  modified_base 9: mod_base = OTHER; note = 2'-deoxy-2'-fluoroguanosine-3'-phosphate
  modified_base 10: mod_base = OTHER; note = 2'-O-methylguanosine-3'-phosphate
  modified_base 11: mod_base = OTHER; note = 2'-O-methyluridine-3'-phosphate
  modified_base 12: mod_base = OTHER; note = 2'-O-methyladenosine-3'-phosphate
  modified_base 13: mod_base = OTHER; note = 2'-O-methylcytidine-3'-phosphate
  modified_base 14: mod_base = OTHER; note = 2'-deoxy-2'-fluoroadenosine-3'-phosphate
  modified_base 15: mod_base = OTHER; note = 2'-O-methyluridine-3'-phosphate
  modified_base 16: mod_base = OTHER; note = 2'-deoxy-2'-fluoroguanosine-3'-phosphate
  modified_base 17: mod_base = OTHER; note = 2'-O-methyluridine-3'-phosphate
  modified_base 18: mod_base = OTHER; note = 2'-O-methyladenosine-3'-phosphate
  modified_base 19: mod_base = OTHER; note = 2'-O-methylcytidine-3'-phosphate
  modified_base 20: mod_base = OTHER; note = 2'-O-methyladenosine-3'-phosphate
  modified_base 21: mod_base = OTHER; note = 2'-O-methylcytidine-3'-phosphorothioate
  modified_base 22: mod_base = OTHER; note = 2'-O-methylcytidine-3'-phosphorothioate
  modified_base 23: mod_base = OTHER; note = 2'-O-methyluridine
taagagctggtacatgtacacct

SEQ ID NO: 684 - RNA, 23 nt, synthetic construct
  source 1..23: mol_type = other RNA
  modified_base 1: mod_base = OTHER; note = 2'-O-methyluridine-3'-phosphorothioate 5'-(E)-Vinylphosphonate
  modified_base 2: mod_base = OTHER; note = 2'-deoxy-2'-fluoroguanosine-3'-phosphorothioate
  modified_base 3: mod_base = OTHER; note = 2'-O-methylguanosine-3'-phosphate
  modified_base 4: mod_base = OTHER; note = 2'-O-methylcytidine-3'-phosphate
  modified_base 5: mod_base = OTHER; note = 2'-O-methyluridine-3'-phosphate
  modified_base 6: mod_base = OTHER; note = 2'-deoxy-2'-fluorouridine-3'-phosphate
  modified_base 7: mod_base = OTHER; note = 2'-O-methylguanosine-3'-phosphate
  modified_base 8: mod_base = OTHER; note = 2'-deoxy-2'-fluoroadenosine-3'-phosphate
  modified_base 9: mod_base = OTHER; note = 2'-deoxy-2'-fluorouridine-3'-phosphate
  modified_base 10: mod_base = OTHER; note = 2'-O-methylguanosine-3'-phosphate
  modified_base 11: mod_base = OTHER; note = 2'-O-methyluridine-3'-phosphate
  modified_base 12: mod_base = OTHER; note = 2'-O-methylcytidine-3'-phosphate
  modified_base 13: mod_base = OTHER; note = 2'-O-methylguanosine-3'-phosphate
  modified_base 14: mod_base = OTHER; note = 2'-deoxy-2'-fluorocytidine-3'-phosphate
  modified_base 15: mod_base = OTHER; note = 2'-O-methylguanosine-3'-phosphate
  modified_base 16: mod_base = OTHER; note = 2'-deoxy-2'-fluoroguanosine-3'-phosphate
  modified_base 17: mod_base = OTHER; note = 2'-O-methyluridine-3'-phosphate
  modified_base 18: mod_base = OTHER; note = 2'-O-methylguanosine-3'-phosphate
  modified_base 19: mod_base = OTHER; note = 2'-O-methyladenosine-3'-phosphate
  modified_base 20: mod_base = OTHER; note = 2'-O-methylcytidine-3'-phosphate
  modified_base 21: mod_base = OTHER; note = 2'-O-methyladenosine-3'-phosphorothioate
  modified_base 22: mod_base = OTHER; note = 2'-O-methylcytidine-3'-phosphorothioate
  modified_base 23: mod_base = OTHER; note = 2'-O-methyladenosine
tggcttgatgtcgcggtgacaca

SEQ ID NO: 685 - RNA, 23 nt, synthetic construct
  source 1..23: mol_type = other RNA
  modified_base 1: mod_base = OTHER; note = 2'-O-methyluridine-3'-phosphorothioate 5'-(E)-Vinylphosphonate
  modified_base 2: mod_base = OTHER; note = 2'-deoxy-2'-fluorouridine-3'-phosphorothioate
  modified_base 3: mod_base = OTHER; note = 2'-O-methylguanosine-3'-phosphate
  modified_base 4: mod_base = OTHER; note = 2'-O-methylguanosine-3'-phosphate
  modified_base 5: mod_base = OTHER; note = 2'-O-methylguanosine-3'-phosphate
  modified_base 6: mod_base = OTHER; note = 2'-deoxy-2'-fluoroadenosine-3'-phosphate
  modified_base 7: mod_base = OTHER; note = 2'-O-methylguanosine-3'-phosphate
  modified_base 8: mod_base = OTHER; note = 2'-deoxy-2'-fluorouridine-3'-phosphate
  modified_base 9: mod_base = OTHER; note = 2'-deoxy-2'-fluoroguanosine-3'-phosphate
  modified_base 10: mod_base = OTHER; note = 2'-O-methylguanosine-3'-phosphate
  modified_base 11: mod_base = OTHER; note = 2'-O-methyladenosine-3'-phosphate
  modified_base 12: mod_base = OTHER; note = 2'-O-methyluridine-3'-phosphate
  modified_base 13: mod_base = OTHER; note = 2'-O-methylguanosine-3'-phosphate
  modified_base 14: mod_base = OTHER; note = 2'-deoxy-2'-fluorouridine-3'-phosphate
  modified_base 15: mod_base = OTHER; note = 2'-O-methyladenosine-3'-phosphate
  modified_base 16: mod_base = OTHER; note = 2'-deoxy-2'-fluoroguanosine-3'-phosphate
  modified_base 17: mod_base = OTHER; note = 2'-O-methylguanosine-3'-phosphate
  modified_base 18: mod_base = OTHER; note = 2'-O-methylcytidine-3'-phosphate
  modified_base 19: mod_base = OTHER; note = 2'-O-methylcytidine-3'-phosphate
  modified_base 20: mod_base = OTHER; note = 2'-O-methyladenosine-3'-phosphate
  modified_base 21: mod_base = OTHER; note = 2'-O-methyladenosine-3'-phosphorothioate
  modified_base 22: mod_base = OTHER; note = 2'-O-methylguanosine-3'-phosphorothioate
  modified_base 23: mod_base = OTHER; note = 2'-O-methylcytidine
ttgggagtggatgtaggccaagc

SEQ ID NO: 686 - RNA, 23 nt, synthetic construct
  source 1..23: mol_type = other RNA
  modified_base 1: mod_base = OTHER; note = 2'-O-methyluridine-3'-phosphorothioate 5'-(E)-Vinylphosphonate
  modified_base 2: mod_base = OTHER; note = 2'-deoxy-2'-fluoroguanosine-3'-phosphorothioate
  modified_base 3: mod_base = OTHER; note = 2'-O-methylguanosine-3'-phosphate
  modified_base 4: mod_base = OTHER; note = 2'-O-methyladenosine-3'-phosphate
  modified_base 5: mod_base = OTHER; note = 2'-O-methylcytidine-3'-phosphate
  modified_base 6: mod_base = OTHER; note = 2'-deoxy-2'-fluorocytidine-3'-phosphate
  modified_base 7: mod_base = OTHER; note = 2'-O-methyladenosine-3'-phosphate
  modified_base 8: mod_base = OTHER; note = 2'-deoxy-2'-fluoroadenosine-3'-phosphate
  modified_base 9: mod_base = OTHER; note = 2'-deoxy-2'-fluorocytidine-3'-phosphate
  modified_base 10: mod_base = OTHER; note = 2'-O-methyluridine-3'-phosphate
  modified_base 11: mod_base = OTHER; note = 2'-O-methylguanosine-3'-phosphate
  modified_base 12: mod_base = OTHER; note = 2'-O-methylcytidine-3'-phosphate
  modified_base 13: mod_base = OTHER; note = 2'-O-methyluridine-3'-phosphate
  modified_base 14: mod_base = OTHER; note = 2'-deoxy-2'-fluorouridine-3'-phosphate
  modified_base 15: mod_base = OTHER; note = 2'-O-methyluridine-3'-phosphate
  modified_base 16: mod_base = OTHER; note = 2'-deoxy-2'-fluoroguanosine-3'-phosphate
  modified_base 17: mod_base = OTHER; note = 2'-O-methylcytidine-3'-phosphate
  modified_base 18: mod_base = OTHER; note = 2'-O-methyladenosine-3'-phosphate
  modified_base 19: mod_base = OTHER; note = 2'-O-methylcytidine-3'-phosphate
  modified_base 20: mod_base = OTHER; note = 2'-O-methyluridine-3'-phosphate
  modified_base 21: mod_base = OTHER; note = 2'-O-methylguanosine-3'-phosphorothioate
  modified_base 22: mod_base = OTHER; note = 2'-O-methylcytidine-3'-phosphorothioate
  modified_base 23: mod_base = OTHER; note = 2'-O-methylcytidine
tggaccaactgctttgcactgcc

SEQ ID NO: 687 - RNA, 23 nt, synthetic construct
  source 1..23: mol_type = other RNA
  modified_base 1: mod_base = OTHER; note = 2'-O-methyluridine-3'-phosphorothioate 5'-(E)-Vinylphosphonate
  modified_base 2: mod_base = OTHER; note = 2'-deoxy-2'-fluoroguanosine-3'-phosphorothioate
  modified_base 3: mod_base = OTHER; note = 2'-O-methyladenosine-3'-phosphate
  modified_base 4: mod_base = OTHER; note = 2'-O-methylguanosine-3'-phosphate
  modified_base 5: mod_base = OTHER; note = 2'-O-methylguanosine-3'-phosphate
  modified_base 6: mod_base = OTHER; note = 2'-deoxy-2'-fluoroadenosine-3'-phosphate
  modified_base 7: mod_base = OTHER; note = 2'-O-methylcytidine-3'-phosphate
  modified_base 8: mod_base = OTHER; note = 2'-deoxy-2'-fluoroadenosine-3'-phosphate
  modified_base 9: mod_base = OTHER; note = 2'-deoxy-2'-fluoroguanosine-3'-phosphate
  modified_base 10: mod_base = OTHER; note = 2'-O-methylcytidine-3'-phosphate
  modified_base 11: mod_base = OTHER; note = 2'-O-methyladenosine-3'-phosphate
  modified_base 12: mod_base = OTHER; note = 2'-O-methylguanosine-3'-phosphate
  modified_base 13: mod_base = OTHER; note = 2'-O-methyluridine-3'-phosphate
  modified_base 14: mod_base = OTHER; note = 2'-deoxy-2'-fluoroguanosine-3'-phosphate
  modified_base 15: mod_base = OTHER; note = 2'-O-methyluridine-3'-phosphate
  modified_base 16: mod_base = OTHER; note = 2'-deoxy-2'-fluorocytidine-3'-phosphate
  modified_base 17: mod_base = OTHER; note = 2'-O-methyladenosine-3'-phosphate
  modified_base 18: mod_base = OTHER; note = 2'-O-methylguanosine-3'-phosphate
  modified_base 19: mod_base = OTHER; note = 2'-O-methylguanosine-3'-phosphate
  modified_base 20: mod_base = OTHER; note = 2'-O-methylguanosine-3'-phosphate
  modified_base 21: mod_base = OTHER; note = 2'-O-methyluridine-3'-phosphorothioate
  modified_base 22: mod_base = OTHER; note = 2'-O-methylcytidine-3'-phosphorothioate
  modified_base 23: mod_base = OTHER; note = 2'-O-methylcytidine
tgaggacagcagtgtcagggtcc

SEQ ID NO: 688 - RNA, 23 nt, synthetic construct
  source 1..23: mol_type = other RNA
  modified_base 1: mod_base = OTHER; note = 2'-O-methyluridine-3'-phosphorothioate 5'-(E)-Vinylphosphonate
  modified_base 2: mod_base = OTHER; note = 2'-deoxy-2'-fluoroadenosine-3'-phosphorothioate
  modified_base 3: mod_base = OTHER; note = 2'-O-methylguanosine-3'-phosphate
  modified_base 4: mod_base = OTHER; note = 2'-O-methyladenosine-3'-phosphate
  modified_base 5: mod_base = OTHER; note = 2'-O-methylguanosine-3'-phosphate
  modified_base 6: mod_base = OTHER; note = 2'-deoxy-2'-fluorocytidine-3'-phosphate
  modified_base 7: mod_base = OTHER; note = 2'-O-methyluridine-3'-phosphate
  modified_base 8: mod_base = OTHER; note = 2'-deoxy-2'-fluorouridine-3'-phosphate
  modified_base 9: mod_base = OTHER; note = 2'-deoxy-2'-fluoroguanosine-3'-phosphate
  modified_base 10: mod_base = OTHER; note = 2'-O-methyladenosine-3'-phosphate
  modified_base 11: mod_base = OTHER; note = 2'-O-methylguanosine-3'-phosphate
  modified_base 12: mod_base = OTHER; note = 2'-O-methylguanosine-3'-phosphate
  modified_base 13: mod_base = OTHER; note = 2'-O-methyladenosine-3'-phosphate
  modified_base 14: mod_base = OTHER; note = 2'-deoxy-2'-fluorocytidine-3'-phosphate
  modified_base 15: mod_base = OTHER; note = 2'-O-methyladenosine-3'-phosphate
  modified_base 16: mod_base = OTHER; note = 2'-deoxy-2'-fluoroguanosine-3'-phosphate
  modified_base 17: mod_base = OTHER; note = 2'-O-methylcytidine-3'-phosphate
  modified_base 18: mod_base = OTHER; note = 2'-O-methyladenosine-3'-phosphate
  modified_base 19: mod_base = OTHER; note = 2'-O-methylguanosine-3'-phosphate
  modified_base 20: mod_base = OTHER; note = 2'-O-methyluridine-3'-phosphate
  modified_base 21: mod_base = OTHER; note = 2'-O-methylguanosine-3'-phosphorothioate
  modified_base 22: mod_base = OTHER; note = 2'-O-methyluridine-3'-phosphorothioate
  modified_base 23: mod_base = OTHER; note = 2'-O-methylcytidine
tagagcttgaggacagcagtgtc

SEQ ID NO: 689 - RNA, 23 nt, synthetic construct
  source 1..23: mol_type = other RNA
  modified_base 1: mod_base = OTHER; note = 2'-O-methyluridine-3'-phosphorothioate 5'-(E)-Vinylphosphonate
  modified_base 2: mod_base = OTHER; note = 2'-deoxy-2'-fluoroadenosine-3'-phosphorothioate
  modified_base 3: mod_base = OTHER; note = 2'-O-methyluridine-3'-phosphate
  modified_base 4: mod_base = OTHER; note = 2'-O-methylguanosine-3'-phosphate
  modified_base 5: mod_base = OTHER; note = 2'-O-methyluridine-3'-phosphate
  modified_base 6: mod_base = OTHER; note = 2'-deoxy-2'-fluoroadenosine-3'-phosphate
  modified_base 7: mod_base = OTHER; note = 2'-O-methylguanosine-3'-phosphate
  modified_base 8: mod_base = OTHER; note = 2'-deoxy-2'-fluoroguanosine-3'-phosphate
  modified_base 9: mod_base = OTHER; note = 2'-deoxy-2'-fluoroadenosine-3'-phosphate
  modified_base 10: mod_base = OTHER; note = 2'-O-methylguanosine-3'-phosphate
  modified_base 11: mod_base = OTHER; note = 2'-O-methyladenosine-3'-phosphate
  modified_base 12: mod_base = OTHER; note = 2'-O-methylcytidine-3'-phosphate
  modified_base 13: mod_base = OTHER; note = 2'-O-methyladenosine-3'-phosphate
  modified_base 14: mod_base = OTHER; note = 2'-deoxy-2'-fluorouridine-3'-phosphate
  modified_base 15: mod_base = OTHER; note = 2'-O-methyluridine-3'-phosphate
  modified_base 16: mod_base = OTHER; note = 2'-deoxy-2'-fluoroguanosine-3'-phosphate
  modified_base 17: mod_base = OTHER; note = 2'-O-methylguanosine-3'-phosphate
  modified_base 18: mod_base = OTHER; note = 2'-O-methylguanosine-3'-phosphate
  modified_base 19: mod_base = OTHER; note = 2'-O-methylcytidine-3'-phosphate
  modified_base 20: mod_base = OTHER; note = 2'-O-methyluridine-3'-phosphate
  modified_base 21: mod_base = OTHER; note = 2'-O-methylcytidine-3'-phosphorothioate
  modified_base 22: mod_base = OTHER; note = 2'-O-methylcytidine-3'-phosphorothioate
  modified_base 23: mod_base = OTHER; note = 2'-O-methylcytidine
tatgtaggagacattgggctccc

SEQ ID NO: 690 - RNA, 23 nt, synthetic construct
  source 1..23: mol_type = other RNA
  modified_base 1: mod_base = OTHER; note = 2'-O-methyluridine-3'-phosphorothioate 5'-(E)-Vinylphosphonate
  modified_base 2: mod_base = OTHER; note = 2'-deoxy-2'-fluoroguanosine-3'-phosphorothioate
  modified_base 3: mod_base = OTHER; note = 2'-O-methyladenosine-3'-phosphate
  modified_base 4: mod_base = OTHER; note = 2'-O-methyladenosine-3'-phosphate
  modified_base 5: mod_base = OTHER; note = 2'-O-methylcytidine-3'-phosphate
  modified_base 6: mod_base = OTHER; note = 2'-deoxy-2'-fluoroadenosine-3'-phosphate
  modified_base 7: mod_base = OTHER; note = 2'-O-methylguanosine-3'-phosphate
  modified_base 8: mod_base = OTHER; note = 2'-deoxy-2'-fluoroadenosine-3'-phosphate
  modified_base 9: mod_base = OTHER; note = 2'-deoxy-2'-fluorouridine-3'-phosphate
  modified_base 10: mod_base = OTHER; note = 2'-O-methylguanosine-3'-phosphate
  modified_base 11: mod_base = OTHER; note = 2'-O-methyluridine-3'-phosphate
  modified_base 12: mod_base = OTHER; note = 2'-O-methyladenosine-3'-phosphate
  modified_base 13: mod_base = OTHER; note = 2'-O-methylguanosine-3'-phosphate
  modified_base 14: mod_base = OTHER; note = 2'-deoxy-2'-fluoroguanosine-3'-phosphate
  modified_base 15: mod_base = OTHER; note = 2'-O-methyladenosine-3'-phosphate
  modified_base 16: mod_base = OTHER; note = 2'-deoxy-2'-fluoroguanosine-3'-phosphate
  modified_base 17: mod_base = OTHER; note = 2'-O-methyladenosine-3'-phosphate
  modified_base 18: mod_base = OTHER; note = 2'-O-methylcytidine-3'-phosphate
  modified_base 19: mod_base = OTHER; note = 2'-O-methyladenosine-3'-phosphate
  modified_base 20: mod_base = OTHER; note = 2'-O-methyluridine-3'-phosphate
  modified_base 21: mod_base = OTHER; note = 2'-O-methyluridine-3'-phosphorothioate
  modified_base 22: mod_base = OTHER; note = 2'-O-methylguanosine-3'-phosphorothioate
  modified_base 23: mod_base = OTHER; note = 2'-O-methylguanosine
tgaacagatgtaggagacattgg

SEQ ID NO: 691 - RNA, 23 nt, synthetic construct
  source 1..23: mol_type = other RNA
  modified_base 1: mod_base = OTHER; note = 2'-O-methyluridine-3'-phosphorothioate 5'-(E)-Vinylphosphonate
  modified_base 2: mod_base = OTHER; note = 2'-deoxy-2'-fluorouridine-3'-phosphorothioate
  modified_base 3: mod_base = OTHER; note = 2'-O-methyladenosine-3'-phosphate
  modified_base 4: mod_base = OTHER; note = 2'-O-methylguanosine-3'-phosphate
  modified_base 5: mod_base = OTHER; note = 2'-O-methyluridine-3'-phosphate
  modified_base 6: mod_base = OTHER; note = 2'-deoxy-2'-fluoroadenosine-3'-phosphate
  modified_base 7: mod_base = OTHER; note = 2'-O-methylguanosine-3'-phosphate
  modified_base 8: mod_base = OTHER; note = 2'-deoxy-2'-fluorocytidine-3'-phosphate
  modified_base 9: mod_base = OTHER; note = 2'-deoxy-2'-fluoroguanosine-3'-phosphate
  modified_base 10: mod_base = OTHER; note = 2'-O-methyladenosine-3'-phosphate
  modified_base 11: mod_base = OTHER; note = 2'-O-methylguanosine-3'-phosphate
  modified_base 12: mod_base = OTHER; note = 2'-O-methyladenosine-3'-phosphate
  modified_base 13: mod_base = OTHER; note = 2'-O-methyladenosine-3'-phosphate
  modified_base 14: mod_base = OTHER; note = 2'-deoxy-2'-fluorocytidine-3'-phosphate
  modified_base 15: mod_base = OTHER; note = 2'-O-methyladenosine-3'-phosphate
  modified_base 16: mod_base = OTHER; note = 2'-deoxy-2'-fluoroguanosine-3'-phosphate
  modified_base 17: mod_base = OTHER; note = 2'-O-methyladenosine-3'-phosphate
  modified_base 18: mod_base = OTHER; note = 2'-O-methyluridine-3'-phosphate
  modified_base 19: mod_base = OTHER; note = 2'-O-methylguanosine-3'-phosphate
  modified_base 20: mod_base = OTHER; note = 2'-O-methyluridine-3'-phosphate
  modified_base 21: mod_base = OTHER; note = 2'-O-methyladenosine-3'-phosphorothioate
  modified_base 22: mod_base = OTHER; note = 2'-O-methylguanosine-3'-phosphorothioate
  modified_base 23: mod_base = OTHER; note = 2'-O-methylguanosine
ttagtagcgagaacagatgtagg

SEQ ID NO: 692 - RNA, 23 nt, synthetic construct
  source 1..23: mol_type = other RNA
  modified_base 1: mod_base = OTHER; note = 2'-O-methyluridine-3'-phosphorothioate 5'-(E)-Vinylphosphonate
  modified_base 2: mod_base = OTHER; note = 2'-deoxy-2'-fluorouridine-3'-phosphorothioate
  modified_base 3: mod_base = OTHER; note = 2'-O-methyluridine-3'-phosphate
  modified_base 4: mod_base = OTHER; note = 2'-O-methyluridine-3'-phosphate
  modified_base 5: mod_base = OTHER; note = 2'-O-methylguanosine-3'-phosphate
  modified_base 6: mod_base = OTHER; note = 2'-deoxy-2'-fluorocytidine-3'-phosphate
  modified_base 7: mod_base = OTHER; note = 2'-O-methyladenosine-3'-phosphate
  modified_base 8: mod_base = OTHER; note = 2'-deoxy-2'-fluorocytidine-3'-phosphate
  modified_base 9: mod_base = OTHER; note = 2'-deoxy-2'-fluorouridine-3'-phosphate
  modified_base 10: mod_base = OTHER; note = 2'-O-methylguanosine-3'-phosphate
  modified_base 11: mod_base = OTHER; note = 2'-O-methylcytidine-3'-phosphate
  modified_base 12: mod_base = OTHER; note = 2'-O-methylcytidine-3'-phosphate
  modified_base 13: mod_base = OTHER; note = 2'-O-methyladenosine-3'-phosphate
  modified_base 14: mod_base = OTHER; note = 2'-deoxy-2'-fluoroadenosine-3'-phosphate
  modified_base 15: mod_base = OTHER; note = 2'-O-methyladenosine-3'-phosphate
  modified_base 16: mod_base = OTHER; note = 2'-deoxy-2'-fluoroadenosine-3'-phosphate
  modified_base 17: mod_base = OTHER; note = 2'-O-methyluridine-3'-phosphate
  modified_base 18: mod_base = OTHER; note = 2'-O-methylcytidine-3'-phosphate
  modified_base 19: mod_base = OTHER; note = 2'-O-methylguanosine-3'-phosphate
  modified_base 20: mod_base = OTHER; note = 2'-O-methylcytidine-3'-phosphate
  modified_base 21: mod_base = OTHER; note = 2'-O-methyladenosine-3'-phosphorothioate
  modified_base 22: mod_base = OTHER; note = 2'-O-methylguanosine-3'-phosphorothioate
  modified_base 23: mod_base = OTHER; note = 2'-O-methyladenosine
ttttgcactgccaaaatcgcaga

SEQ ID NO: 693 - RNA, 23 nt, synthetic construct
  source 1..23: mol_type = other RNA
  modified_base 1: mod_base = OTHER; note = 2'-O-methyluridine-3'-phosphorothioate 5'-(E)-Vinylphosphonate
  modified_base 2: mod_base = OTHER; note = 2'-deoxy-2'-fluoroguanosine-3'-phosphorothioate
  modified_base 3: mod_base = OTHER; note = 2'-O-methylguanosine-3'-phosphate
  modified_base 4: mod_base = OTHER; note = 2'-O-methylcytidine-3'-phosphate
  modified_base 5: mod_base = OTHER; note = 2'-O-methylcytidine-3'-phosphate
  modified_base 6: mod_base = OTHER; note = 2'-deoxy-2'-fluorocytidine-3'-phosphate
  modified_base 7: mod_base = OTHER; note = 2'-O-methylguanosine-3'-phosphate
  modified_base 8: mod_base = OTHER; note = 2'-deoxy-2'-fluoroguanosine-3'-phosphate
  modified_base 9: mod_base = OTHER; note = 2'-deoxy-2'-fluorouridine-3'-phosphate
  modified_base 10: mod_base = OTHER; note = 2'-O-methyladenosine-3'-phosphate
  modified_base 11: mod_base = OTHER; note = 2'-O-methylguanosine-3'-phosphate
  modified_base 12: mod_base = OTHER; note = 2'-O-methyluridine-3'-phosphate
  modified_base 13: mod_base = OTHER; note = 2'-O-methyladenosine-3'-phosphate
  modified_base 14: mod_base = OTHER; note = 2'-deoxy-2'-fluoroguanosine-3'-phosphate
  modified_base 15: mod_base = OTHER; note = 2'-O-methylcytidine-3'-phosphate
  modified_base 16: mod_base = OTHER; note = 2'-deoxy-2'-fluoroguanosine-3'-phosphate
  modified_base 17: mod_base = OTHER; note = 2'-O-methyladenosine-3'-phosphate
  modified_base 18: mod_base = OTHER; note = 2'-O-methylguanosine-3'-phosphate
  modified_base 19: mod_base = OTHER; note = 2'-O-methyladenosine-3'-phosphate
  modified_base 20: mod_base = OTHER; note = 2'-O-methyladenosine-3'-phosphate
  modified_base 21: mod_base = OTHER; note = 2'-O-methylcytidine-3'-phosphorothioate
  modified_base 22: mod_base = OTHER; note = 2'-O-methyladenosine-3'-phosphorothioate
  modified_base 23: mod_base = OTHER; note = 2'-O-methylguanosine
tggcccggtagtagcgagaacag

SEQ ID NO: 694 - RNA, 23 nt, synthetic construct
  source 1..23: mol_type = other RNA
  modified_base 1: mod_base = OTHER; note = 2'-O-methyluridine-3'-phosphorothioate 5'-(E)-Vinylphosphonate
  modified_base 2: mod_base = OTHER; note = 2'-deoxy-2'-fluoroadenosine-3'-phosphorothioate
  modified_base 3: mod_base = OTHER; note = 2'-O-methylguanosine-3'-phosphate
  modified_base 4: mod_base = OTHER; note = 2'-O-methyluridine-3'-phosphate
  modified_base 5: mod_base = OTHER; note = 2'-O-methylguanosine-3'-phosphate
  modified_base 6: mod_base = OTHER; note = 2'-deoxy-2'-fluoroguanosine-3'-phosphate
  modified_base 7: mod_base = OTHER; note = 2'-O-methylcytidine-3'-phosphate
  modified_base 8: mod_base = OTHER; note = 2'-deoxy-2'-fluorouridine-3'-phosphate
  modified_base 9: mod_base = OTHER; note = 2'-deoxy-2'-fluorocytidine-3'-phosphate
  modified_base 10: mod_base = OTHER; note = 2'-O-methylcytidine-3'-phosphate
  modified_base 11: mod_base = OTHER; note = 2'-O-methyladenosine-3'-phosphate
  modified_base 12: mod_base = OTHER; note = 2'-O-methyladenosine-3'-phosphate
  modified_base 13: mod_base = OTHER; note = 2'-O-methyladenosine-3'-phosphate
  modified_base 14: mod_base = OTHER; note = 2'-deoxy-2'-fluoroguanosine-3'-phosphate
  modified_base 15: mod_base = OTHER; note = 2'-O-methyladenosine-3'-phosphate
  modified_base 16: mod_base = OTHER; note = 2'-deoxy-2'-fluorouridine-3'-phosphate
  modified_base 17: mod_base = OTHER; note = 2'-O-methylguanosine-3'-phosphate
  modified_base 18: mod_base = OTHER; note = 2'-O-methyladenosine-3'-phosphate
  modified_base 19: mod_base = OTHER; note = 2'-O-methylguanosine-3'-phosphate
  modified_base 20: mod_base = OTHER; note = 2'-O-methylcytidine-3'-phosphate
  modified_base 21: mod_base = OTHER; note = 2'-O-methyluridine-3'-phosphorothioate
  modified_base 22: mod_base = OTHER; note = 2'-O-methylcytidine-3'-phosphorothioate
  modified_base 23: mod_base = OTHER; note = 2'-O-methyluridine
tagtggctccaaagatgagctct

SEQ ID NO: 695 - RNA, 23 nt, synthetic construct
  source 1..23: mol_type = other RNA
  modified_base 1: mod_base = OTHER; note = 2'-O-methyluridine-3'-phosphorothioate 5'-(E)-Vinylphosphonate
  modified_base 2: mod_base = OTHER; note = 2'-deoxy-2'-fluoroguanosine-3'-phosphorothioate
  modified_base 3: mod_base = OTHER; note = 2'-O-methyluridine-3'-phosphate
  modified_base 4: mod_base = OTHER; note = 2'-O-methyladenosine-3'-phosphate
  modified_base 5: mod_base = OTHER; note = 2'-O-methyladenosine-3'-phosphate
  modified_base 6: mod_base = OTHER; note = 2'-deoxy-2'-fluorouridine-3'-phosphate
  modified_base 7: mod_base = OTHER; note = 2'-O-methylcytidine-3'-phosphate
  modified_base 8: mod_base = OTHER; note = 2'-deoxy-2'-fluoroadenosine-3'-phosphate
  modified_base 9: mod_base = OTHER; note = 2'-deoxy-2'-fluoroguanosine-3'-phosphate
  modified_base 10: mod_base = OTHER; note = 2'-O-methyluridine-3'-phosphate
  modified_base 11: mod_base = OTHER; note = 2'-O-methylguanosine-3'-phosphate
  modified_base 12: mod_base = OTHER; note = 2'-O-methylguanosine-3'-phosphate
  modified_base 13: mod_base = OTHER; note = 2'-O-methylcytidine-3'-phosphate
  modified_base 14: mod_base = OTHER; note = 2'-deoxy-2'-fluorouridine-3'-phosphate
  modified_base 15: mod_base = OTHER; note = 2'-O-methylcytidine-3'-phosphate
  modified_base 16: mod_base = OTHER; note = 2'-deoxy-2'-fluorocytidine-3'-phosphate
  modified_base 17: mod_base = OTHER; note = 2'-O-methyladenosine-3'-phosphate
  modified_base 18: mod_base = OTHER; note = 2'-O-methyladenosine-3'-phosphate
  modified_base 19: mod_base = OTHER; note = 2'-O-methyladenosine-3'-phosphate
  modified_base 20: mod_base = OTHER; note = 2'-O-methylguanosine-3'-phosphate
  modified_base 21: mod_base = OTHER; note = 2'-O-methyladenosine-3'-phosphorothioate
  modified_base 22: mod_base = OTHER; note = 2'-O-methyluridine-3'-phosphorothioate
  modified_base 23: mod_base = OTHER; note = 2'-O-methylguanosine
tgtaatcagtggctccaaagatg

SEQ ID NO: 696 - RNA, 23 nt, synthetic construct
  source 1..23: mol_type = other RNA
  modified_base 1: mod_base = OTHER; note = 2'-O-methyluridine-3'-phosphorothioate 5'-(E)-Vinylphosphonate
  modified_base 2: mod_base = OTHER; note = 2'-deoxy-2'-fluorouridine-3'-phosphorothioate
  modified_base 3: mod_base = OTHER; note = 2'-O-methylguanosine-3'-phosphate
  modified_base 4: mod_base = OTHER; note = 2'-O-methyladenosine-3'-phosphate
  modified_base 5: mod_base = OTHER; note = 2'-O-methylguanosine-3'-phosphate
  modified_base 6: mod_base = OTHER; note = 2'-deoxy-2'-fluoroguanosine-3'-phosphate
  modified_base 7: mod_base = OTHER; note = 2'-O-methyluridine-3'-phosphate
  modified_base 8: mod_base = OTHER; note = 2'-deoxy-2'-fluoroguanosine-3'-phosphate
  modified_base 9: mod_base = OTHER; note = 2'-deoxy-2'-fluorouridine-3'-phosphate
  modified_base 10: mod_base = OTHER; note = 2'-O-methyladenosine-3'-phosphate
  modified_base 11: mod_base = OTHER; note = 2'-O-methyladenosine-3'-phosphate
  modified_base 12: mod_base = OTHER; note = 2'-O-methyluridine-3'-phosphate
  modified_base 13: mod_base = OTHER; note = 2'-O-methylcytidine-3'-phosphate
  modified_base 14: mod_base = OTHER; note = 2'-deoxy-2'-fluoroadenosine-3'-phosphate
  modified_base 15: mod_base = OTHER; note = 2'-O-methylguanosine-3'-phosphate
  modified_base 16: mod_base = OTHER; note = 2'-deoxy-2'-fluorouridine-3'-phosphate
  modified_base 17: mod_base = OTHER; note = 2'-O-methylguanosine-3'-phosphate
  modified_base 18: mod_base = OTHER; note = 2'-O-methylguanosine-3'-phosphate
  modified_base 19: mod_base = OTHER; note = 2'-O-methylcytidine-3'-phosphate
  modified_base 20: mod_base = OTHER; note = 2'-O-methyluridine-3'-phosphate
  modified_base 21: mod_base = OTHER; note = 2'-O-methylcytidine-3'-phosphorothioate
  modified_base 22: mod_base = OTHER; note = 2'-O-methylcytidine-3'-phosphorothioate
  modified_base 23: mod_base = OTHER; note = 2'-O-methyladenosine
ttgaggtgtaatcagtggctcca

SEQ ID NO: 697 - RNA, 23 nt, synthetic construct
  source 1..23: mol_type = other RNA
  modified_base 1: mod_base = OTHER; note = 2'-O-methyluridine-3'-phosphorothioate 5'-(E)-Vinylphosphonate
  modified_base 2: mod_base = OTHER; note = 2'-deoxy-2'-fluorocytidine-3'-phosphorothioate
  modified_base 3: mod_base = OTHER; note = 2'-O-methylguanosine-3'-phosphate
  modified_base 4: mod_base = OTHER; note = 2'-O-methyladenosine-3'-phosphate
  modified_base 5: mod_base = OTHER; note = 2'-O-methyluridine-3'-phosphate
  modified_base 6: mod_base = OTHER; note = 2'-deoxy-2'-fluoroguanosine-3'-phosphate
  modified_base 7: mod_base = OTHER; note = 2'-O-methylguanosine-3'-phosphate
  modified_base 8: mod_base = OTHER; note = 2'-deoxy-2'-fluoroadenosine-3'-phosphate
  modified_base 9: mod_base = OTHER; note = 2'-deoxy-2'-fluorouridine-3'-phosphate
  modified_base 10: mod_base = OTHER; note = 2'-O-methylguanosine-3'-phosphate
  modified_base 11: mod_base = OTHER; note = 2'-O-methyladenosine-3'-phosphate
  modified_base 12: mod_base = OTHER; note = 2'-O-methylguanosine-3'-phosphate
  modified_base 13: mod_base = OTHER; note = 2'-O-methylguanosine-3'-phosphate
  modified_base 14: mod_base = OTHER; note = 2'-deoxy-2'-fluorouridine-3'-phosphate
  modified_base 15: mod_base = OTHER; note = 2'-O-methylguanosine-3'-phosphate
  modified_base 16: mod_base = OTHER; note = 2'-deoxy-2'-fluorouridine-3'-phosphate
  modified_base 17: mod_base = OTHER; note = 2'-O-methyladenosine-3'-phosphate
  modified_base 18: mod_base = OTHER; note = 2'-O-methyladenosine-3'-phosphate
  modified_base 19: mod_base = OTHER; note = 2'-O-methyluridine-3'-phosphate
  modified_base 20: mod_base = OTHER; note = 2'-O-methylcytidine-3'-phosphate
  modified_base 21: mod_base = OTHER; note = 2'-O-methyladenosine-3'-phosphorothioate
  modified_base 22: mod_base = OTHER; note = 2'-O-methylguanosine-3'-phosphorothioate
  modified_base 23: mod_base = OTHER; note = 2'-O-methyluridine
tcgatggatgaggtgtaatcagt

SEQ ID NO: 698 - RNA, 23 nt, synthetic construct
  source 1..23: mol_type = other RNA
  modified_base 1: mod_base = OTHER; note = 2'-O-methyluridine-3'-phosphorothioate 5'-(E)-Vinylphosphonate
  modified_base 2: mod_base = OTHER; note = 2'-deoxy-2'-fluoroadenosine-3'-phosphorothioate
  modified_base 3: mod_base = OTHER; note = 2'-O-methyladenosine-3'-phosphate
  modified_base 4: mod_base = OTHER; note = 2'-O-methyladenosine-3'-phosphate
  modified_base 5: mod_base = OTHER; note = 2'-O-methylcytidine-3'-phosphate
  modified_base 6: mod_base = OTHER; note = 2'-deoxy-2'-fluoroadenosine-3'-phosphate
  modified_base 7: mod_base = OTHER; note = 2'-O-methyluridine-3'-phosphate
  modified_base 8: mod_base = OTHER; note = 2'-deoxy-2'-fluorocytidine-3'-phosphate
  modified_base 9: mod_base = OTHER; note = 2'-deoxy-2'-fluoroguanosine-3'-phosphate
  modified_base 10: mod_base = OTHER; note = 2'-O-methyladenosine-3'-phosphate
  modified_base 11: mod_base = OTHER; note = 2'-O-methyluridine-3'-phosphate
  modified_base 12: mod_base = OTHER; note = 2'-O-methylguanosine-3'-phosphate
  modified_base 13: mod_base = OTHER; note = 2'-O-methylguanosine-3'-phosphate
  modified_base 14: mod_base = OTHER; note = 2'-deoxy-2'-fluoroadenosine-3'-phosphate
  modified_base 15: mod_base = OTHER; note = 2'-O-methyluridine-3'-phosphate
  modified_base 16: mod_base = OTHER; note = 2'-deoxy-2'-fluoroguanosine-3'-phosphate
  modified_base 17: mod_base = OTHER; note = 2'-O-methyladenosine-3'-phosphate
  modified_base 18: mod_base = OTHER; note = 2'-O-methylguanosine-3'-phosphate
  modified_base 19: mod_base = OTHER; note = 2'-O-methylguanosine-3'-phosphate
  modified_base 20: mod_base = OTHER; note = 2'-O-methyluridine-3'-phosphate
  modified_base 21: mod_base = OTHER; note = 2'-O-methylguanosine-3'-phosphorothioate
  modified_base 22: mod_base = OTHER; note = 2'-O-methyluridine-3'-phosphorothioate
  modified_base 23: mod_base = OTHER; note = 2'-O-methyladenosine
taaacatcgatggatgaggtgta

SEQ ID NO: 699 - RNA, 23 nt, synthetic construct
  source 1..23: mol_type = other RNA
  modified_base 1: mod_base = OTHER; note = 2'-O-methyluridine-3'-phosphorothioate 5'-(E)-Vinylphosphonate
  modified_base 2: mod_base = OTHER; note = 2'-deoxy-2'-fluorocytidine-3'-phosphorothioate
  modified_base 3: mod_base = OTHER; note = 2'-O-methyluridine-3'-phosphate
  modified_base 4: mod_base = OTHER; note = 2'-O-methylguanosine-3'-phosphate
  modified_base 5: mod_base = OTHER; note = 2'-O-methyladenosine-3'-phosphate
  modified_base 6: mod_base = OTHER; note = 2'-deoxy-2'-fluorocytidine-3'-phosphate
  modified_base 7: mod_base = OTHER; note = 2'-O-methylcytidine-3'-phosphate
  modified_base 8: mod_base = OTHER; note = 2'-deoxy-2'-fluoroadenosine-3'-phosphate
  modified_base 9: mod_base = OTHER; note = 2'-deoxy-2'-fluoroadenosine-3'-phosphate
  modified_base 10: mod_base = OTHER; note = 2'-O-methyladenosine-3'-phosphate
  modified_base 11: mod_base = OTHER; note = 2'-O-methylcytidine-3'-phosphate
  modified_base 12: mod_base = OTHER; note = 2'-O-methyladenosine-3'-phosphate
  modified_base 13: mod_base = OTHER; note = 2'-O-methyluridine-3'-phosphate
  modified_base 14: mod_base = OTHER; note = 2'-deoxy-2'-fluorocytidine-3'-phosphate
  modified_base 15: mod_base = OTHER; note = 2'-O-methylguanosine-3'-phosphate
  modified_base 16: mod_base = OTHER; note = 2'-deoxy-2'-fluoroadenosine-3'-phosphate
  modified_base 17: mod_base = OTHER; note = 2'-O-methyluridine-3'-phosphate
  modified_base 18: mod_base = OTHER; note = 2'-O-methylguanosine-3'-phosphate
  modified_base 19: mod_base = OTHER; note = 2'-O-methylguanosine-3'-phosphate
  modified_base 20: mod_base = OTHER; note = 2'-O-methyladenosine-3'-phosphate
  modified_base 21: mod_base = OTHER; note = 2'-O-methyluridine-3'-phosphorothioate
  modified_base 22: mod_base = OTHER; note = 2'-O-methylguanosine-3'-phosphorothioate
  modified_base 23: mod_base = OTHER; note = 2'-O-methyladenosine
tctgaccaaacatcgatggatga

SEQ ID NO: 700 - RNA, 23 nt, synthetic construct
  source 1..23: mol_type = other RNA
  modified_base 1: mod_base = OTHER; note = 2'-O-methyluridine-3'-phosphorothioate 5'-(E)-Vinylphosphonate
  modified_base 2: mod_base = OTHER; note = 2'-deoxy-2'-fluorouridine-3'-phosphorothioate
  modified_base 3: mod_base = OTHER; note = 2'-O-methylcytidine-3'-phosphate
  modified_base 4: mod_base = OTHER; note = 2'-O-methyluridine-3'-phosphate
  modified_base 5: mod_base = OTHER; note = 2'-O-methylguanosine-3'-phosphate
  modified_base 6: mod_base = OTHER; note = 2'-deoxy-2'-fluorocytidine-3'-phosphate
  modified_base 7: mod_base = OTHER; note = 2'-O-methylcytidine-3'-phosphate
  modified_base 8: mod_base = OTHER; note = 2'-deoxy-2'-fluoroadenosine-3'-phosphate
  modified_base 9: mod_base = OTHER; note = 2'-deoxy-2'-fluoroguanosine-3'-phosphate
  modified_base 10: mod_base = OTHER; note = 2'-O-methyluridine-3'-phosphate
  modified_base 11: mod_base = OTHER; note = 2'-O-methyladenosine-3'-phosphate
  modified_base 12: mod_base = OTHER; note = 2'-O-methylcytidine-3'-phosphate
  modified_base 13: mod_base = OTHER; note = 2'-O-methyladenosine-3'-phosphate
  modified_base 14: mod_base = OTHER; note = 2'-deoxy-2'-fluorocytidine-3'-phosphate
  modified_base 15: mod_base = OTHER; note = 2'-O-methyladenosine-3'-phosphate
  modified_base 16: mod_base = OTHER; note = 2'-deoxy-2'-fluoroguanosine-3'-phosphate
  modified_base 17: mod_base = OTHER; note = 2'-O-methylcytidine-3'-phosphate
  modified_base 18: mod_base = OTHER; note = 2'-O-methylcytidine-3'-phosphate
  modified_base 19: mod_base = OTHER; note = 2'-O-methyladenosine-3'-phosphate
  modified_base 20: mod_base = OTHER; note = 2'-O-methylguanosine-3'-phosphate
  modified_base 21: mod_base = OTHER; note = 2'-O-methylcytidine-3'-phosphorothioate
  modified_base 22: mod_base = OTHER; note = 2'-O-methyluridine-3'-phosphorothioate
  modified_base 23: mod_base = OTHER; note = 2'-O-methylguanosine
ttctgccagtacacagccagctg

SEQ ID NO: 701 - RNA, 23 nt, synthetic construct
  source 1..23: mol_type = other RNA
  modified_base 1: mod_base = OTHER; note = 2'-O-methyluridine-3'-phosphorothioate 5'-(E)-Vinylphosphonate
  modified_base 2: mod_base = OTHER; note = 2'-deoxy-2'-fluorocytidine-3'-phosphorothioate
  modified_base 3: mod_base = OTHER; note = 2'-O-methyladenosine-3'-phosphate
  modified_base 4: mod_base = OTHER; note = 2'-O-methyladenosine-3'-phosphate
  modified_base 5: mod_base = OTHER; note = 2'-O-methylguanosine-3'-phosphate
  modified_base 6: mod_base = OTHER; note = 2'-deoxy-2'-fluoroadenosine-3'-phosphate
  modified_base 7: mod_base = OTHER; note = 2'-O-methylguanosine-3'-phosphate
  modified_base 8: mod_base = OTHER; note = 2'-deoxy-2'-fluoroguanosine-3'-phosphate
  modified_base 9: mod_base = OTHER; note = 2'-deoxy-2'-fluoroadenosine-3'-phosphate
  modified_base 10: mod_base = OTHER; note = 2'-O-methylguanosine-3'-phosphate
  modified_base 11: mod_base = OTHER; note = 2'-O-methylcytidine-3'-phosphate
  modified_base 12: mod_base = OTHER; note = 2'-O-methyluridine-3'-phosphate
  modified_base 13: mod_base = OTHER; note = 2'-O-methylcytidine-3'-phosphate
  modified_base 14: mod_base = OTHER; note = 2'-deoxy-2'-fluorouridine-3'-phosphate
  modified_base 15: mod_base = OTHER; note = 2'-O-methylguanosine-3'-phosphate
  modified_base 16: mod_base = OTHER; note = 2'-deoxy-2'-fluorocytidine-3'-phosphate
  modified_base 17: mod_base = OTHER; note = 2'-O-methylcytidine-3'-phosphate
  modified_base 18: mod_base = OTHER; note = 2'-O-methyladenosine-3'-phosphate
  modified_base 19: mod_base = OTHER; note = 2'-O-methylguanosine-3'-phosphate
  modified_base 20: mod_base = OTHER; note = 2'-O-methyluridine-3'-phosphate
  modified_base 21: mod_base = OTHER; note = 2'-O-methyladenosine-3'-phosphorothioate
  modified_base 22: mod_base = OTHER; note = 2'-O-methylcytidine-3'-phosphorothioate
  modified_base 23: mod_base = OTHER; note = 2'-O-methyladenosine
tcaagaggagctctgccagtaca

SEQ ID NO: 702 - RNA, 23 nt, synthetic construct
  source 1..23: mol_type = other RNA
  modified_base 1: mod_base = OTHER; note = 2'-O-methyluridine-3'-phosphorothioate 5'-(E)-Vinylphosphonate
  modified_base 2: mod_base = OTHER; note = 2'-deoxy-2'-fluoroguanosine-3'-phosphorothioate
  modified_base 3: mod_base = OTHER; note = 2'-O-methylguanosine-3'-phosphate
  modified_base 4: mod_base = OTHER; note = 2'-O-methyladenosine-3'-phosphate
  modified_base 5: mod_base = OTHER; note = 2'-O-methyladenosine-3'-phosphate
  modified_base 6: mod_base = OTHER; note = 2'-deoxy-2'-fluoroguanosine-3'-phosphate
  modified_base 7: mod_base = OTHER; note = 2'-O-methyladenosine-3'-phosphate
  modified_base 8: mod_base = OTHER; note = 2'-deoxy-2'-fluorouridine-3'-phosphate
  modified_base 9: mod_base = OTHER; note = 2'-deoxy-2'-fluoroguanosine-3'-phosphate
  modified_base 10: mod_base = OTHER; note = 2'-O-methylguanosine-3'-phosphate
  modified_base 11: mod_base = OTHER; note = 2'-O-methylguanosine-3'-phosphate
  modified_base 12: mod_base = OTHER; note = 2'-O-methylcytidine-3'-phosphate
  modified_base 13: mod_base = OTHER; note = 2'-O-methyluridine-3'-phosphate
  modified_base 14: mod_base = OTHER; note = 2'-deoxy-2'-fluoroguanosine-3'-phosphate
  modified_base 15: mod_base = OTHER; note = 2'-O-methylguanosine-3'-phosphate
  modified_base 16: mod_base = OTHER; note = 2'-deoxy-2'-fluorocytidine-3'-phosphate
  modified_base 17: mod_base = OTHER; note = 2'-O-methylcytidine-3'-phosphate
  modified_base 18: mod_base = OTHER; note = 2'-O-methylcytidine-3'-phosphate
  modified_base 19: mod_base = OTHER; note = 2'-O-methyladenosine-3'-phosphate
  modified_base 20: mod_base = OTHER; note = 2'-O-methyladenosine-3'-phosphate
  modified_base 21: mod_base = OTHER; note = 2'-O-methylguanosine-3'-phosphorothioate
  modified_base 22: mod_base = OTHER; note = 2'-O-methyladenosine-3'-phosphorothioate
  modified_base 23: mod_base = OTHER; note = 2'-O-methylguanosine
tggaagatgggctggcccaagag

SEQ ID NO: 703 - RNA, 23 nt, synthetic construct
  source 1..23: mol_type = other RNA
  modified_base 1: mod_base = OTHER; note = 2'-O-methyluridine-3'-phosphorothioate 5'-(E)-Vinylphosphonate
  modified_base 2: mod_base = OTHER; note = 2'-deoxy-2'-fluorouridine-3'-phosphorothioate
  modified_base 3: mod_base = OTHER; note = 2'-O-methyluridine-3'-phosphate
  modified_base 4: mod_base = OTHER; note = 2'-O-methylguanosine-3'-phosphate
  modified_base 5: mod_base = OTHER; note = 2'-O-methyladenosine-3'-phosphate
  modified_base 6: mod_base = OTHER; note = 2'-deoxy-2'-fluorouridine-3'-phosphate
  modified_base 7: mod_base = OTHER; note = 2'-O-methylguanosine-3'-phosphate
  modified_base 8: mod_base = OTHER; note = 2'-deoxy-2'-fluoroadenosine-3'-phosphate
  modified_base 9: mod_base = OTHER; note = 2'-deoxy-2'-fluorouridine-3'-phosphate
  modified_base 10: mod_base = OTHER; note = 2'-O-methylcytidine-3'-phosphate
  modified_base 11: mod_base = OTHER; note = 2'-O-methyluridine-3'-phosphate
  modified_base 12: mod_base = OTHER; note = 2'-O-methylcytidine-3'-phosphate
  modified_base 13: mod_base = OTHER; note = 2'-O-methylcytidine-3'-phosphate
  modified_base 14: mod_base = OTHER; note = 2'-deoxy-2'-fluoroadenosine-3'-phosphate
  modified_base 15: mod_base = OTHER; note = 2'-O-methylcytidine-3'-phosphate
  modified_base 16: mod_base = OTHER; note = 2'-deoxy-2'-fluorocytidine-3'-phosphate
  modified_base 17: mod_base = OTHER; note = 2'-O-methyladenosine-3'-phosphate
  modified_base 18: mod_base = OTHER; note = 2'-O-methylguanosine-3'-phosphate
  modified_base 19: mod_base = OTHER; note = 2'-O-methylcytidine-3'-phosphate
  modified_base 20: mod_base = OTHER; note = 2'-O-methyluridine-3'-phosphate
  modified_base 21: mod_base = OTHER; note = 2'-O-methylguanosine-3'-phosphorothioate
  modified_base 22: mod_base = OTHER; note = 2'-O-methylguanosine-3'-phosphorothioate
  modified_base 23: mod_base = OTHER; note = 2'-O-methyluridine
tttgatgatctccaccagctggt

SEQ ID NO: 704 - RNA, 23 nt, synthetic construct
  source 1..23: mol_type = other RNA
  modified_base 1: mod_base = OTHER; note = 2'-O-methyluridine-3'-phosphorothioate 5'-(E)-Vinylphosphonate
  modified_base 2: mod_base = OTHER; note = 2'-deoxy-2'-fluoroadenosine-3'-phosphorothioate
  modified_base 3: mod_base = OTHER; note = 2'-O-methylguanosine-3'-phosphate
  modified_base 4: mod_base = OTHER; note = 2'-O-methylcytidine-3'-phosphate
  modified_base 5: mod_base = OTHER; note = 2'-O-methyladenosine-3'-phosphate
  modified_base 6: mod_base = OTHER; note = 2'-deoxy-2'-fluorocytidine-3'-phosphate
  modified_base 7: mod_base = OTHER; note = 2'-O-methylcytidine-3'-phosphate
  modified_base 8: mod_base = OTHER; note = 2'-deoxy-2'-fluorouridine-3'-phosphate
  modified_base 9: mod_base = OTHER; note = 2'-deoxy-2'-fluorouridine-3'-phosphate
  modified_base 10: mod_base = OTHER; note = 2'-O-methylguanosine-3'-phosphate
  modified_base 11: mod_base = OTHER; note = 2'-O-methyladenosine-3'-phosphate
  modified_base 12: mod_base = OTHER; note = 2'-O-methyluridine-3'-phosphate
  modified_base 13: mod_base = OTHER; note = 2'-O-methylguanosine-3'-phosphate
  modified_base 14: mod_base = OTHER; note = 2'-deoxy-2'-fluoroadenosine-3'-phosphate
  modified_base 15: mod_base = OTHER; note = 2'-O-methyluridine-3'-phosphate
  modified_base 16: mod_base = OTHER; note = 2'-deoxy-2'-fluorocytidine-3'-phosphate
  modified_base 17: mod_base = OTHER; note = 2'-O-methyluridine-3'-phosphate
  modified_base 18: mod_base = OTHER; note = 2'-O-methylcytidine-3'-phosphate
  modified_base 19: mod_base = OTHER; note = 2'-O-methylcytidine-3'-phosphate
  modified_base 20: mod_base = OTHER; note = 2'-O-methyladenosine-3'-phosphate
  modified_base 21: mod_base = OTHER; note = 2'-O-methylcytidine-3'-phosphorothioate
  modified_base 22: mod_base = OTHER; note = 2'-O-methylcytidine-3'-phosphorothioate
  modified_base 23: mod_base = OTHER; note = 2'-O-methyladenosine
tagcaccttgatgatctccacca

SEQ ID NO: 705 - RNA, 23 nt, synthetic construct
  source 1..23: mol_type = other RNA
  modified_base 1: mod_base = OTHER; note = 2'-O-methyluridine-3'-phosphorothioate 5'-(E)-Vinylphosphonate
  modified_base 2: mod_base = OTHER; note = 2'-deoxy-2'-fluoroguanosine-3'-phosphorothioate
  modified_base 3: mod_base = OTHER; note = 2'-O-methyluridine-3'-phosphate
  modified_base 4: mod_base = OTHER; note = 2'-O-methyluridine-3'-phosphate
  modified_base 5: mod_base = OTHER; note = 2'-O-methylguanosine-3'-phosphate
  modified_base 6: mod_base = OTHER; note = 2'-deoxy-2'-fluoroguanosine-3'-phosphate
  modified_base 7: mod_base = OTHER; note = 2'-O-methyluridine-3'-phosphate
  modified_base 8: mod_base = OTHER; note = 2'-deoxy-2'-fluoroguanosine-3'-phosphate
  modified_base 9: mod_base = OTHER; note = 2'-deoxy-2'-fluorouridine-3'-phosphate
  modified_base 10: mod_base = OTHER; note = 2'-O-methyluridine-3'-phosphate
  modified_base 11: mod_base = OTHER; note = 2'-O-methylcytidine-3'-phosphate
  modified_base 12: mod_base = OTHER; note = 2'-O-methylcytidine-3'-phosphate
  modified_base 13: mod_base = OTHER; note = 2'-O-methylcytidine-3'-phosphate
  modified_base 14: mod_base = OTHER; note = 2'-deoxy-2'-fluoroadenosine-3'-phosphate
  modified_base 15: mod_base = OTHER; note = 2'-O-methylguanosine-3'-phosphate
  modified_base 16: mod_base = OTHER; note = 2'-deoxy-2'-fluorocytidine-3'-phosphate
  modified_base 17: mod_base = OTHER; note = 2'-O-methyladenosine-3'-phosphate
  modified_base 18: mod_base = OTHER; note = 2'-O-methylcytidine-3'-phosphate
  modified_base 19: mod_base = OTHER; note = 2'-O-methylcytidine-3'-phosphate
  modified_base 20: mod_base = OTHER; note = 2'-O-methyluridine-3'-phosphate
  modified_base 21: mod_base = OTHER; note = 2'-O-methyluridine-3'-phosphorothioate
  modified_base 22: mod_base = OTHER; note = 2'-O-methylguanosine-3'-phosphorothioate
  modified_base 23: mod_base = OTHER; note = 2'-O-methyladenosine
tgttggtgttcccagcaccttga

SEQ ID NO: 706 - RNA, 23 nt, synthetic construct
  source 1..23: mol_type = other RNA
  modified_base 1: mod_base = OTHER; note = 2'-O-methyluridine-3'-phosphorothioate 5'-(E)-Vinylphosphonate
  modified_base 2: mod_base = OTHER; note = 2'-deoxy-2'-fluorouridine-3'-phosphorothioate
  modified_base 3: mod_base = OTHER; note = 2'-O-methyluridine-3'-phosphate
  modified_base 4: mod_base = OTHER; note = 2'-O-methylcytidine-3'-phosphate
  modified_base 5: mod_base = OTHER; note = 2'-O-methylcytidine-3'-phosphate
  modified_base 6: mod_base = OTHER; note = 2'-deoxy-2'-fluorocytidine-3'-phosphate
  modified_base 7: mod_base = OTHER; note = 2'-O-methylguanosine-3'-phosphate
  modified_base 8: mod_base = OTHER; note = 2'-deoxy-2'-fluoroguanosine-3'-phosphate
  modified_base 9: mod_base = OTHER; note = 2'-deoxy-2'-fluoroguanosine-3'-phosphate
  modified_base 10: mod_base = OTHER; note = 2'-O-methyluridine-3'-phosphate
  modified_base 11: mod_base = OTHER; note = 2'-O-methyluridine-3'-phosphate
  modified_base 12: mod_base = OTHER; note = 2'-O-methylguanosine-3'-phosphate
  modified_base 13: mod_base = OTHER; note = 2'-O-methylguanosine-3'-phosphate
  modified_base 14: mod_base = OTHER; note = 2'-deoxy-2'-fluorouridine-3'-phosphate
  modified_base 15: mod_base = OTHER; note = 2'-O-methylguanosine-3'-phosphate
  modified_base 16: mod_base = OTHER; note = 2'-deoxy-2'-fluorouridine-3'-phosphate
  modified_base 17: mod_base = OTHER; note = 2'-O-methyluridine-3'-phosphate
  modified_base 18: mod_base = OTHER; note = 2'-O-methylcytidine-3'-phosphate
  modified_base 19: mod_base = OTHER; note = 2'-O-methylcytidine-3'-phosphate
  modified_base 20: mod_base = OTHER; note = 2'-O-methylcytidine-3'-phosphate
  modified_base 21: mod_base = OTHER; note = 2'-O-methyladenosine-3'-phosphorothioate
  modified_base 22: mod_base = OTHER; note = 2'-O-methylguanosine-3'-phosphorothioate
  modified_base 23: mod_base = OTHER; note = 2'-O-methylcytidine
tttcccgggttggtgttcccagc

SEQ ID NO: 707 - RNA, 23 nt, synthetic construct
  source 1..23: mol_type = other RNA
  modified_base 1: mod_base = OTHER; note = 2'-O-methyluridine-3'-phosphorothioate 5'-(E)-Vinylphosphonate
  modified_base 2: mod_base = OTHER; note = 2'-deoxy-2'-fluorocytidine-3'-phosphorothioate
  modified_base 3: mod_base = OTHER; note = 2'-O-methylguanosine-3'-phosphate
  modified_base 4: mod_base = OTHER; note = 2'-O-methylguanosine-3'-phosphate
  modified_base 5: mod_base = OTHER; note = 2'-O-methyladenosine-3'-phosphate
  modified_base 6: mod_base = OTHER; note = 2'-deoxy-2'-fluorouridine-3'-phosphate
  modified_base 7: mod_base = OTHER; note = 2'-O-methyluridine-3'-phosphate
  modified_base 8: mod_base = OTHER; note = 2'-deoxy-2'-fluorouridine-3'-phosphate
  modified_base 9: mod_base = OTHER; note = 2'-deoxy-2'-fluoroguanosine-3'-phosphate
  modified_base 10: mod_base = OTHER; note = 2'-O-methyluridine-3'-phosphate
  modified_base 11: mod_base = OTHER; note = 2'-O-methyluridine-3'-phosphate
  modified_base 12: mod_base = OTHER; note = 2'-O-methylcytidine-3'-phosphate
  modified_base 13: mod_base = OTHER; note = 2'-O-methylcytidine-3'-phosphate
  modified_base 14: mod_base = OTHER; note = 2'-deoxy-2'-fluorocytidine-3'-phosphate
  modified_base 15: mod_base = OTHER; note = 2'-O-methylguanosine-3'-phosphate
  modified_base 16: mod_base = OTHER; note = 2'-deoxy-2'-fluoroguanosine-3'-phosphate
  modified_base 17: mod_base = OTHER; note = 2'-O-methylguanosine-3'-phosphate
  modified_base 18: mod_base = OTHER; note = 2'-O-methyluridine-3'-phosphate
  modified_base 19: mod_base = OTHER; note = 2'-O-methyluridine-3'-phosphate
  modified_base 20: mod_base = OTHER; note = 2'-O-methylguanosine-3'-phosphate
  modified_base 21: mod_base = OTHER; note = 2'-O-methylguanosine-3'-phosphorothioate
  modified_base 22: mod_base = OTHER; note = 2'-O-methyluridine-3'-phosphorothioate
  modified_base 23: mod_base = OTHER; note = 2'-O-methylguanosine
tcggatttgttcccgggttggtg

SEQ ID NO: 708 - RNA, 23 nt, synthetic construct
  source 1..23: mol_type = other RNA
  modified_base 1: mod_base = OTHER; note = 2'-O-methyluridine-3'-phosphorothioate 5'-(E)-Vinylphosphonate
  modified_base 2: mod_base = OTHER; note = 2'-deoxy-2'-fluoroadenosine-3'-phosphorothioate
  modified_base 3: mod_base = OTHER; note = 2'-O-methyluridine-3'-phosphate
  modified_base 4: mod_base = OTHER; note = 2'-O-methylcytidine-3'-phosphate
  modified_base 5: mod_base = OTHER; note = 2'-O-methyluridine-3'-phosphate
  modified_base 6: mod_base = OTHER; note = 2'-deoxy-2'-fluorocytidine-3'-phosphate
  modified_base 7: mod_base = OTHER; note = 2'-O-methyluridine-3'-phosphate
  modified_base 8: mod_base = OTHER; note = 2'-deoxy-2'-fluorocytidine-3'-phosphate
  modified_base 9: mod_base = OTHER; note = 2'-deoxy-2'-fluoroguanosine-3'-phosphate
  modified_base 10: mod_base = OTHER; note = 2'-O-methylguanosine-3'-phosphate
  modified_base 11: mod_base = OTHER; note = 2'-O-methyladenosine-3'-phosphate
  modified_base 12: mod_base = OTHER; note = 2'-O-methyluridine-3'-phosphate
  modified_base 13: mod_base = OTHER; note = 2'-O-methyluridine-3'-phosphate
  modified_base 14: mod_base = OTHER; note = 2'-deoxy-2'-fluorouridine-3'-phosphate
  modified_base 15: mod_base = OTHER; note = 2'-O-methylguanosine-3'-phosphate
  modified_base 16: mod_base = OTHER; note = 2'-deoxy-2'-fluorouridine-3'-phosphate
  modified_base 17: mod_base = OTHER; note = 2'-O-methyluridine-3'-phosphate
  modified_base 18: mod_base = OTHER; note = 2'-O-methylcytidine-3'-phosphate
  modified_base 19: mod_base = OTHER; note = 2'-O-methylcytidine-3'-phosphate
  modified_base 20: mod_base = OTHER; note = 2'-O-methylcytidine-3'-phosphate
  modified_base 21: mod_base = OTHER; note = 2'-O-methylguanosine-3'-phosphorothioate
  modified_base 22: mod_base = OTHER; note = 2'-O-methylguanosine-3'-phosphorothioate
  modified_base 23: mod_base = OTHER; note = 2'-O-methylguanosine
tatctctcggatttgttcccggg

SEQ ID NO: 709 - RNA, 23 nt, synthetic construct
  source 1..23: mol_type = other RNA
  modified_base 1: mod_base = OTHER; note = 2'-O-methyluridine-3'-phosphorothioate 5'-(E)-Vinylphosphonate
  modified_base 2: mod_base = OTHER; note = 2'-deoxy-2'-fluoroadenosine-3'-phosphorothioate
  modified_base 3: mod_base = OTHER; note = 2'-O-methylguanosine-3'-phosphate
  modified_base 4: mod_base = OTHER; note = 2'-O-methylguanosine-3'-phosphate
  modified_base 5: mod_base = OTHER; note = 2'-O-methylguanosine-3'-phosphate
  modified_base 6: mod_base = OTHER; note = 2'-deoxy-2'-fluoroadenosine-3'-phosphate
  modified_base 7: mod_base = OTHER; note = 2'-O-methyladenosine-3'-phosphate
  modified_base 8: mod_base = OTHER; note = 2'-deoxy-2'-fluorocytidine-3'-phosphate
  modified_base 9: mod_base = OTHER; note = 2'-deoxy-2'-fluorouridine-3'-phosphate
  modified_base 10: mod_base = OTHER; note = 2'-O-methyluridine-3'-phosphate
  modified_base 11: mod_base = OTHER; note = 2'-O-methylguanosine-3'-phosphate
  modified_base 12: mod_base = OTHER; note = 2'-O-methyladenosine-3'-phosphate
  modified_base 13: mod_base = OTHER; note = 2'-O-methyladenosine-3'-phosphate
  modified_base 14: mod_base = OTHER; note = 2'-deoxy-2'-fluorocytidine-3'-phosphate
  modified_base 15: mod_base = OTHER; note = 2'-O-methyluridine-3'-phosphate
  modified_base 16: mod_base = OTHER; note = 2'-deoxy-2'-fluorocytidine-3'-phosphate
  modified_base 17: mod_base = OTHER; note = 2'-O-methylcytidine-3'-phosphate
  modified_base 18: mod_base = OTHER; note = 2'-O-methylguanosine-3'-phosphate
  modified_base 19: mod_base = OTHER; note = 2'-O-methyluridine-3'-phosphate
  modified_base 20: mod_base = OTHER; note = 2'-O-methylguanosine-3'-phosphate
  modified_base 21: mod_base = OTHER; note = 2'-O-methyluridine-3'-phosphorothioate
  modified_base 22: mod_base = OTHER; note = 2'-O-methyladenosine-3'-phosphorothioate
  modified_base 23: mod_base = OTHER; note = 2'-O-methylguanosine
tagggaacttgaactccgtgtag

SEQ ID NO: 710 - RNA, 23 nt, synthetic construct
  source 1..23: mol_type = other RNA
  modified_base 1: mod_base = OTHER; note = 2'-O-methyluridine-3'-phosphorothioate 5'-(E)-Vinylphosphonate
  modified_base 2: mod_base = OTHER; note = 2'-deoxy-2'-fluorouridine-3'-phosphorothioate
  modified_base 3: mod_base = OTHER; note = 2'-O-methyladenosine-3'-phosphate
  modified_base 4: mod_base = OTHER; note = 2'-O-methyladenosine-3'-phosphate
  modified_base 5: mod_base = OTHER; note = 2'-O-methyluridine-3'-phosphate
  modified_base 6: mod_base = OTHER; note = 2'-deoxy-2'-fluorocytidine-3'-phosphate
  modified_base 7: mod_base = OTHER; note = 2'-O-methyluridine-3'-phosphate
  modified_base 8: mod_base = OTHER; note = 2'-deoxy-2'-fluoroguanosine-3'-phosphate
  modified_base 9: mod_base = OTHER; note = 2'-deoxy-2'-fluoroadenosine-3'-phosphate
  modified_base 10: mod_base = OTHER; note = 2'-O-methylguanosine-3'-phosphate
  modified_base 11: mod_base = OTHER; note = 2'-O-methylguanosine-3'-phosphate
  modified_base 12: mod_base = OTHER; note = 2'-O-methylguanosine-3'-phosphate
  modified_base 13: mod_base = OTHER; note = 2'-O-methyladenosine-3'-phosphate
  modified_base 14: mod_base = OTHER; note = 2'-deoxy-2'-fluoroadenosine-3'-phosphate
  modified_base 15: mod_base = OTHER; note = 2'-O-methylcytidine-3'-phosphate
  modified_base 16: mod_base = OTHER; note = 2'-deoxy-2'-fluorouridine-3'-phosphate
  modified_base 17: mod_base = OTHER; note = 2'-O-methyluridine-3'-phosphate
  modified_base 18: mod_base = OTHER; note = 2'-O-methylguanosine-3'-phosphate
  modified_base 19: mod_base = OTHER; note = 2'-O-methyladenosine-3'-phosphate
  modified_base 20: mod_base = OTHER; note = 2'-O-methyladenosine-3'-phosphate
  modified_base 21: mod_base = OTHER; note = 2'-O-methylcytidine-3'-phosphorothioate
  modified_base 22: mod_base = OTHER; note = 2'-O-methyluridine-3'-phosphorothioate
  modified_base 23: mod_base = OTHER; note = 2'-O-methylcytidine
ttaatctgagggaacttgaactc

SEQ ID NO: 711 - RNA, 23 nt, synthetic construct
  source 1..23: mol_type = other RNA
  modified_base 1: mod_base = OTHER; note = 2'-O-methyluridine-3'-phosphorothioate 5'-(E)-Vinylphosphonate
  modified_base 2: mod_base = OTHER; note = 2'-deoxy-2'-fluoroguanosine-3'-phosphorothioate
  modified_base 3: mod_base = OTHER; note = 2'-O-methyladenosine-3'-phosphate
  modified_base 4: mod_base = OTHER; note = 2'-O-methylguanosine-3'-phosphate
  modified_base 5: mod_base = OTHER; note = 2'-O-methylcytidine-3'-phosphate
  modified_base 6: mod_base = OTHER; note = 2'-deoxy-2'-fluorouridine-3'-phosphate
  modified_base 7: mod_base = OTHER; note = 2'-O-methyluridine-3'-phosphate
  modified_base 8: mod_base = OTHER; note = 2'-deoxy-2'-fluorouridine-3'-phosphate
  modified_base 9: mod_base = OTHER; note = 2'-deoxy-2'-fluoroadenosine-3'-phosphate
  modified_base 10: mod_base = OTHER; note = 2'-O-methyladenosine-3'-phosphate
  modified_base 11: mod_base = OTHER; note = 2'-O-methyluridine-3'-phosphate
  modified_base 12: mod_base = OTHER; note = 2'-O-methylcytidine-3'-phosphate
  modified_base 13: mod_base = OTHER; note = 2'-O-methyluridine-3'-phosphate
  modified_base 14: mod_base = OTHER; note = 2'-deoxy-2'-fluoroguanosine-3'-phosphate
  modified_base 15: mod_base = OTHER; note = 2'-O-methyladenosine-3'-phosphate
  modified_base 16: mod_base = OTHER; note = 2'-deoxy-2'-fluoroguanosine-3'-phosphate
  modified_base 17: mod_base = OTHER; note = 2'-O-methylguanosine-3'-phosphate
  modified_base 18: mod_base = OTHER; note = 2'-O-methylguanosine-3'-phosphate
  modified_base 19: mod_base = OTHER; note = 2'-O-methyladenosine-3'-phosphate
  modified_base 20: mod_base = OTHER; note = 2'-O-methyladenosine-3'-phosphate
  modified_base 21: mod_base = OTHER; note = 2'-O-methylcytidine-3'-phosphorothioate
  modified_base 22: mod_base = OTHER; note = 2'-O-methyluridine-3'-phosphorothioate
  modified_base 23: mod_base = OTHER; note = 2'-O-methyluridine
tgagctttaatctgagggaactt

SEQ ID NO: 712 - RNA, 23 nt, synthetic construct
  source 1..23: mol_type = other RNA
  modified_base 1: mod_base = OTHER; note = 2'-O-methyluridine-3'-phosphorothioate 5'-(E)-Vinylphosphonate
  modified_base 2: mod_base = OTHER; note = 2'-deoxy-2'-fluoroadenosine-3'-phosphorothioate
  modified_base 3: mod_base = OTHER; note = 2'-O-methyluridine-3'-phosphate
  modified_base 4: mod_base = OTHER; note = 2'-O-methyluridine-3'-phosphate
  modified_base 5: mod_base = OTHER; note = 2'-O-methyluridine-3'-phosphate
  modified_base 6: mod_base = OTHER; note = 2'-deoxy-2'-fluoroguanosine-3'-phosphate
  modified_base 7: mod_base = OTHER; note = 2'-O-methyladenosine-3'-phosphate
  modified_base 8: mod_base = OTHER; note = 2'-deoxy-2'-fluoroadenosine-3'-phosphate
  modified_base 9: mod_base = OTHER; note = 2'-deoxy-2'-fluorocytidine-3'-phosphate
  modified_base 10: mod_base = OTHER; note = 2'-O-methyladenosine-3'-phosphate
  modified_base 11: mod_base = OTHER; note = 2'-O-methylcytidine-3'-phosphate
  modified_base 12: mod_base = OTHER; note = 2'-O-methylcytidine-3'-phosphate
  modified_base 13: mod_base = OTHER; note = 2'-O-methyluridine-3'-phosphate
  modified_base 14: mod_base = OTHER; note = 2'-deoxy-2'-fluorouridine-3'-phosphate
  modified_base 15: mod_base = OTHER; note = 2'-O-methyluridine-3'-phosphate
  modified_base 16: mod_base = OTHER; note = 2'-deoxy-2'-fluoroguanosine-3'-phosphate
  modified_base 17: mod_base = OTHER; note = 2'-O-methyluridine-3'-phosphate
  modified_base 18: mod_base = OTHER; note = 2'-O-methylcytidine-3'-phosphate
  modified_base 19: mod_base = OTHER; note = 2'-O-methylcytidine-3'-phosphate
  modified_base 20: mod_base = OTHER; note = 2'-O-methyladenosine-3'-phosphate
  modified_base 21: mod_base = OTHER; note = 2'-O-methylguanosine-3'-phosphorothioate
  modified_base 22: mod_base = OTHER; note = 2'-O-methylguanosine-3'-phosphorothioate
  modified_base 23: mod_base = OTHER; note = 2'-O-methylguanosine
tatttgaacacctttgtccaggg

SEQ ID NO: 713 - RNA, 23 nt, synthetic construct
  source 1..23: mol_type = other RNA
  modified_base 1: mod_base = OTHER; note = 2'-O-methyluridine-3'-phosphorothioate 5'-(E)-Vinylphosphonate
  modified_base 2: mod_base = OTHER; note = 2'-deoxy-2'-fluorouridine-3'-phosphorothioate
  modified_base 3: mod_base = OTHER; note = 2'-O-methyluridine-3'-phosphate
  modified_base 4: mod_base = OTHER; note = 2'-O-methylcytidine-3'-phosphate
  modified_base 5: mod_base = OTHER; note = 2'-O-methylguanosine-3'-phosphate
  modified_base 6: mod_base = OTHER; note = 2'-deoxy-2'-fluoroadenosine-3'-phosphate
  modified_base 7: mod_base = OTHER; note = 2'-O-methylguanosine-3'-phosphate
  modified_base 8: mod_base = OTHER; note = 2'-deoxy-2'-fluoroadenosine-3'-phosphate
  modified_base 9: mod_base = OTHER; note = 2'-deoxy-2'-fluorouridine-3'-phosphate
  modified_base 10: mod_base = OTHER; note = 2'-O-methyluridine-3'-phosphate
  modified_base 11: mod_base = OTHER; note = 2'-O-methyluridine-3'-phosphate
  modified_base 12: mod_base = OTHER; note = 2'-O-methylguanosine-3'-phosphate
  modified_base 13: mod_base = OTHER; note = 2'-O-methyladenosine-3'-phosphate
  modified_base 14: mod_base = OTHER; note = 2'-deoxy-2'-fluoroadenosine-3'-phosphate
  modified_base 15: mod_base = OTHER; note = 2'-O-methylcytidine-3'-phosphate
  modified_base 16: mod_base = OTHER; note = 2'-deoxy-2'-fluoroadenosine-3'-phosphate
  modified_base 17: mod_base = OTHER; note = 2'-O-methylcytidine-3'-phosphate
  modified_base 18: mod_base = OTHER; note = 2'-O-methylcytidine-3'-phosphate
  modified_base 19: mod_base = OTHER; note = 2'-O-methyluridine-3'-phosphate
  modified_base 20: mod_base = OTHER; note = 2'-O-methyluridine-3'-phosphate
  modified_base 21: mod_base = OTHER; note = 2'-O-methyluridine-3'-phosphorothioate
  modified_base 22: mod_base = OTHER; note = 2'-O-methylguanosine-3'-phosphorothioate
  modified_base 23: mod_base = OTHER; note = 2'-O-methyluridine
tttcgagatttgaacacctttgt

SEQ ID NO: 714 - RNA, 23 nt, synthetic construct
  source 1..23: mol_type = other RNA
  modified_base 1: mod_base = OTHER; note = 2'-O-methyluridine-3'-phosphorothioate 5'-(E)-Vinylphosphonate
  modified_base 2: mod_base = OTHER; note = 2'-deoxy-2'-fluoroguanosine-3'-phosphorothioate
  modified_base 3: mod_base = OTHER; note = 2'-O-methylcytidine-3'-phosphate
  modified_base 4: mod_base = OTHER; note = 2'-O-methylguanosine-3'-phosphate
  modified_base 5: mod_base = OTHER; note = 2'-O-methylguanosine-3'-phosphate
  modified_base 6: mod_base = OTHER; note = 2'-deoxy-2'-fluorocytidine-3'-phosphate
  modified_base 7: mod_base = OTHER; note = 2'-O-methylguanosine-3'-phosphate
  modified_base 8: mod_base = OTHER; note = 2'-deoxy-2'-fluorouridine-3'-phosphate
  modified_base 9: mod_base = OTHER; note = 2'-deoxy-2'-fluorouridine-3'-phosphate
  modified_base 10: mod_base = OTHER; note = 2'-O-methylcytidine-3'-phosphate
  modified_base 11: mod_base = OTHER; note = 2'-O-methylguanosine-3'-phosphate
  modified_base 12: mod_base = OTHER; note = 2'-O-methyladenosine-3'-phosphate
  modified_base 13: mod_base = OTHER; note = 2'-O-methylguanosine-3'-phosphate
  modified_base 14: mod_base = OTHER; note = 2'-deoxy-2'-fluoroadenosine-3'-phosphate
  modified_base 15: mod_base = OTHER; note = 2'-O-methyluridine-3'-phosphate
  modified_base 16: mod_base = OTHER; note = 2'-deoxy-2'-fluorouridine-3'-phosphate
  modified_base 17: mod_base = OTHER; note = 2'-O-methyluridine-3'-phosphate
  modified_base 18: mod_base = OTHER; note = 2'-O-methylguanosine-3'-phosphate
  modified_base 19: mod_base = OTHER; note = 2'-O-methyladenosine-3'-phosphate
  modified_base 20: mod_base = OTHER; note = 2'-O-methyladenosine-3'-phosphate
  modified_base 21: mod_base = OTHER; note = 2'-O-methylcytidine-3'-phosphorothioate
  modified_base 22: mod_base = OTHER; note = 2'-O-methyladenosine-3'-phosphorothioate
  modified_base 23: mod_base = OTHER; note = 2'-O-methylcytidine
tgcggcgttcgagatttgaacac

SEQ ID NO: 715 - RNA, 23 nt, synthetic construct
  source 1..23: mol_type = other RNA
  modified_base 1: mod_base = OTHER; note = 2'-O-methyluridine-3'-phosphorothioate 5'-(E)-Vinylphosphonate
  modified_base 2: mod_base = OTHER; note = 2'-deoxy-2'-fluoroadenosine-3'-phosphorothioate
  modified_base 3: mod_base = OTHER; note = 2'-O-methylguanosine-3'-phosphate
  modified_base 4: mod_base = OTHER; note = 2'-O-methyladenosine-3'-phosphate
  modified_base 5: mod_base = OTHER; note = 2'-O-methylguanosine-3'-phosphate
  modified_base 6: mod_base = OTHER; note = 2'-deoxy-2'-fluorocytidine-3'-phosphate
  modified_base 7: mod_base = OTHER; note = 2'-O-methyladenosine-3'-phosphate
  modified_base 8: mod_base = OTHER; note = 2'-deoxy-2'-fluoroguanosine-3'-phosphate
  modified_base 9: mod_base = OTHER; note = 2'-deoxy-2'-fluoroadenosine-3'-phosphate
  modified_base 10: mod_base = OTHER; note = 2'-O-methylguanosine-3'-phosphate
  modified_base 11: mod_base = OTHER; note = 2'-O-methylcytidine-3'-phosphate
  modified_base 12: mod_base = OTHER; note = 2'-O-methylguanosine-3'-phosphate
  modified_base 13: mod_base = OTHER; note = 2'-O-methylcytidine-3'-phosphate
  modified_base 14: mod_base = OTHER; note = 2'-deoxy-2'-fluoroguanosine-3'-phosphate
  modified_base 15: mod_base = OTHER; note = 2'-O-methyladenosine-3'-phosphate
  modified_base 16: mod_base = OTHER; note = 2'-deoxy-2'-fluorouridine-3'-phosphate
  modified_base 17: mod_base = OTHER; note = 2'-O-methylguanosine-3'-phosphate
  modified_base 18: mod_base = OTHER; note = 2'-O-methylguanosine-3'-phosphate
  modified_base 19: mod_base = OTHER; note = 2'-O-methylcytidine-3'-phosphate
  modified_base 20: mod_base = OTHER; note = 2'-O-methylcytidine-3'-phosphate
  modified_base 21: mod_base = OTHER; note = 2'-O-methyluridine-3'-phosphorothioate
  modified_base 22: mod_base = OTHER; note = 2'-O-methylcytidine-3'-phosphorothioate
  modified_base 23: mod_base = OTHER; note = 2'-O-methyluridine
tagagcagagcgcgatggcctct

SEQ ID NO: 716 - RNA, 23 nt, synthetic construct
  source 1..23: mol_type = other RNA
  modified_base 1: mod_base = OTHER; note = 2'-O-methyluridine-3'-phosphorothioate 5'-(E)-Vinylphosphonate
  modified_base 2: mod_base = OTHER; note = 2'-deoxy-2'-fluorocytidine-3'-phosphorothioate
  modified_base 3: mod_base = OTHER; note = 2'-O-methyladenosine-3'-phosphate
  modified_base 4: mod_base = OTHER; note = 2'-O-methylguanosine-3'-phosphate
  modified_base 5: mod_base = OTHER; note = 2'-O-methylguanosine-3'-phosphate
  modified_base 6: mod_base = OTHER; note = 2'-deoxy-2'-fluorocytidine-3'-phosphate
  modified_base 7: mod_base = OTHER; note = 2'-O-methyluridine-3'-phosphate
  modified_base 8: mod_base = OTHER; note = 2'-deoxy-2'-fluoroadenosine-3'-phosphate
  modified_base 9: mod_base = OTHER; note = 2'-deoxy-2'-fluoroguanosine-3'-phosphate
  modified_base 10: mod_base = OTHER; note = 2'-O-methyladenosine-3'-phosphate
  modified_base 11: mod_base = OTHER; note = 2'-O-methylguanosine-3'-phosphate
  modified_base 12: mod_base = OTHER; note = 2'-O-methylcytidine-3'-phosphate
  modified_base 13: mod_base = OTHER; note = 2'-O-methyladenosine-3'-phosphate
  modified_base 14: mod_base = OTHER; note = 2'-deoxy-2'-fluoroguanosine-3'-phosphate
  modified_base 15: mod_base = OTHER; note = 2'-O-methyladenosine-3'-phosphate
  modified_base 16: mod_base = OTHER; note = 2'-deoxy-2'-fluoroguanosine-3'-phosphate
  modified_base 17: mod_base = OTHER; note = 2'-O-methylcytidine-3'-phosphate
  modified_base 18: mod_base = OTHER; note = 2'-O-methylguanosine-3'-phosphate
  modified_base 19: mod_base = OTHER; note = 2'-O-methylcytidine-3'-phosphate
  modified_base 20: mod_base = OTHER; note = 2'-O-methylguanosine-3'-phosphate
  modified_base 21: mod_base = OTHER; note = 2'-O-methyladenosine-3'-phosphorothioate
  modified_base 22: mod_base = OTHER; note = 2'-O-methyluridine-3'-phosphorothioate
  modified_base 23: mod_base = OTHER; note = 2'-O-methylguanosine
tcaggctagagcagagcgcgatg

SEQ ID NO: 717 - RNA, 23 nt, synthetic construct
  source 1..23: mol_type = other RNA
  modified_base 1: mod_base = OTHER; note = 2'-O-methyluridine-3'-phosphorothioate 5'-(E)-Vinylphosphonate
  modified_base 2: mod_base = OTHER; note = 2'-deoxy-2'-fluoroguanosine-3'-phosphorothioate
  modified_base 3: mod_base = OTHER; note = 2'-O-methyluridine-3'-phosphate
  modified_base 4: mod_base = OTHER; note = 2'-O-methylguanosine-3'-phosphate
  modified_base 5: mod_base = OTHER; note = 2'-O-methyluridine-3'-phosphate
  modified_base 6: mod_base = OTHER; note = 2'-deoxy-2'-fluoroadenosine-3'-phosphate
  modified_base 7: mod_base = OTHER; note = 2'-O-methylcytidine-3'-phosphate
  modified_base 8: mod_base = OTHER; note = 2'-deoxy-2'-fluorouridine-3'-phosphate
  modified_base 9: mod_base = OTHER; note = 2'-deoxy-2'-fluorocytidine-3'-phosphate
  modified_base 10: mod_base = OTHER; note = 2'-O-methylcytidine-3'-phosphate
  modified_base 11: mod_base = OTHER; note = 2'-O-methyladenosine-3'-phosphate
  modified_base 12: mod_base = OTHER; note = 2'-O-methylguanosine-3'-phosphate
  modified_base 13: mod_base = OTHER; note = 2'-O-methylcytidine-3'-phosphate
  modified_base 14: mod_base = OTHER; note = 2'-deoxy-2'-fluoroadenosine-3'-phosphate
  modified_base 15: mod_base = OTHER; note = 2'-O-methylguanosine-3'-phosphate
  modified_base 16: mod_base = OTHER; note = 2'-deoxy-2'-fluoroguanosine-3'-phosphate
  modified_base 17: mod_base = OTHER; note = 2'-O-methylcytidine-3'-phosphate
  modified_base 18: mod_base = OTHER; note = 2'-O-methyluridine-3'-phosphate
  modified_base 19: mod_base = OTHER; note = 2'-O-methyladenosine-3'-phosphate
  modified_base 20: mod_base = OTHER; note = 2'-O-methylguanosine-3'-phosphate
  modified_base 21: mod_base = OTHER; note = 2'-O-methyladenosine-3'-phosphorothioate
  modified_base 22: mod_base = OTHER; note = 2'-O-methylguanosine-3'-phosphorothioate
  modified_base 23: mod_base = OTHER; note = 2'-O-methylcytidine
tgtgtactccagcaggctagagc

SEQ ID NO: 718 - RNA, 23 nt, synthetic construct
  source 1..23: mol_type = other RNA
  modified_base 1: mod_base = OTHER; note = 2'-O-methyluridine-3'-phosphorothioate 5'-(E)-Vinylphosphonate
  modified_base 2: mod_base = OTHER; note = 2'-deoxy-2'-fluoroadenosine-3'-phosphorothioate
  modified_base 3: mod_base = OTHER; note = 2'-O-methyluridine-3'-phosphate
  modified_base 4: mod_base = OTHER; note = 2'-O-methylcytidine-3'-phosphate
  modified_base 5: mod_base = OTHER; note = 2'-O-methyladenosine-3'-phosphate
  modified_base 6: mod_base = OTHER; note = 2'-deoxy-2'-fluoroadenosine-3'-phosphate
  modified_base 7: mod_base = OTHER; note = 2'-O-methyladenosine-3'-phosphate
  modified_base 8: mod_base = OTHER; note = 2'-deoxy-2'-fluoroguanosine-3'-phosphate
  modified_base 9: mod_base = OTHER; note = 2'-deoxy-2'-fluoroadenosine-3'-phosphate
  modified_base 10: mod_base = OTHER; note = 2'-O-methyladenosine-3'-phosphate
  modified_base 11: mod_base = OTHER; note = 2'-O-methylguanosine-3'-phosphate
  modified_base 12: mod_base = OTHER; note = 2'-O-methylcytidine-3'-phosphate
  modified_base 13: mod_base = OTHER; note = 2'-O-methyluridine-3'-phosphate
  modified_base 14: mod_base = OTHER; note = 2'-deoxy-2'-fluoroguanosine-3'-phosphate
  modified_base 15: mod_base = OTHER; note = 2'-O-methyluridine-3'-phosphate
  modified_base 16: mod_base = OTHER; note = 2'-deoxy-2'-fluoroguanosine-3'-phosphate
  modified_base 17: mod_base = OTHER; note = 2'-O-methylcytidine-3'-phosphate
  modified_base 18: mod_base = OTHER; note = 2'-O-methylguanosine-3'-phosphate
  modified_base 19: mod_base = OTHER; note = 2'-O-methylcytidine-3'-phosphate
  modified_base 20: mod_base = OTHER; note = 2'-O-methyladenosine-3'-phosphate
  modified_base 21: mod_base = OTHER; note = 2'-O-methylcytidine-3'-phosphorothioate
  modified_base 22: mod_base = OTHER; note = 2'-O-methyladenosine-3'-phosphorothioate
  modified_base 23: mod_base = OTHER; note = 2'-O-methylguanosine
tatcaaagaagctgtgcgcacag

SEQ ID NO: 719 - RNA, 23 nt, synthetic construct
  source 1..23: mol_type = other RNA
  modified_base 1: mod_base = OTHER; note = 2'-O-methyluridine-3'-phosphorothioate 5'-(E)-Vinylphosphonate
  modified_base 2: mod_base = OTHER; note = 2'-deoxy-2'-fluorocytidine-3'-phosphorothioate
  modified_base 3: mod_base = OTHER; note = 2'-O-methyladenosine-3'-phosphate
  modified_base 4: mod_base = OTHER; note = 2'-O-methylguanosine-3'-phosphate
  modified_base 5: mod_base = OTHER; note = 2'-O-methyluridine-3'-phosphate
  modified_base 6: mod_base = OTHER; note = 2'-deoxy-2'-fluorouridine-3'-phosphate
  modified_base 7: mod_base = OTHER; note = 2'-O-methylcytidine-3'-phosphate
  modified_base 8: mod_base = OTHER; note = 2'-deoxy-2'-fluoroadenosine-3'-phosphate
  modified_base 9: mod_base = OTHER; note = 2'-deoxy-2'-fluorouridine-3'-phosphate
  modified_base 10: mod_base = OTHER; note = 2'-O-methylcytidine-3'-phosphate
  modified_base 11: mod_base = OTHER; note = 2'-O-methyladenosine-3'-phosphate
  modified_base 12: mod_base = OTHER; note = 2'-O-methyladenosine-3'-phosphate
  modified_base 13: mod_base = OTHER; note = 2'-O-methyladenosine-3'-phosphate
  modified_base 14: mod_base = OTHER; note = 2'-deoxy-2'-fluoroguanosine-3'-phosphate
  modified_base 15: mod_base = OTHER; note = 2'-O-methyladenosine-3'-phosphate
  modified_base 16: mod_base = OTHER; note = 2'-deoxy-2'-fluoroadenosine-3'-phosphate
  modified_base 17: mod_base = OTHER; note = 2'-O-methylguanosine-3'-phosphate
  modified_base 18: mod_base = OTHER; note = 2'-O-methylcytidine-3'-phosphate
  modified_base 19: mod_base = OTHER; note = 2'-O-methyluridine-3'-phosphate
  modified_base 20: mod_base = OTHER; note = 2'-O-methylguanosine-3'-phosphate
  modified_base 21: mod_base = OTHER; note = 2'-O-methyluridine-3'-phosphorothioate
  modified_base 22: mod_base = OTHER; note = 2'-O-methylguanosine-3'-phosphorothioate
  modified_base 23: mod_base = OTHER; note = 2'-O-methylcytidine
tcagttcatcaaagaagctgtgc

SEQ ID NO: 720 - RNA, 23 nt, synthetic construct
  source 1..23: mol_type = other RNA
  modified_base 1: mod_base = OTHER; note = 2'-O-methyluridine-3'-phosphorothioate 5'-(E)-Vinylphosphonate
  modified_base 2: mod_base = OTHER; note = 2'-deoxy-2'-fluoroadenosine-3'-phosphorothioate
  modified_base 3: mod_base = OTHER; note = 2'-O-methylguanosine-3'-phosphate
  modified_base 4: mod_base = OTHER; note = 2'-O-methyladenosine-3'-phosphate
  modified_base 5: mod_base = OTHER; note = 2'-O-methylcytidine-3'-phosphate
  modified_base 6: mod_base = OTHER; note = 2'-deoxy-2'-fluoroadenosine-3'-phosphate
  modified_base 7: mod_base = OTHER; note = 2'-O-methyluridine-3'-phosphate
  modified_base 8: mod_base = OTHER; note = 2'-deoxy-2'-fluorocytidine-3'-phosphate
  modified_base 9: mod_base = OTHER; note = 2'-deoxy-2'-fluoroguanosine-3'-phosphate
  modified_base 10: mod_base = OTHER; note = 2'-O-methylcytidine-3'-phosphate
  modified_base 11: mod_base = OTHER; note = 2'-O-methyladenosine-3'-phosphate
  modified_base 12: mod_base = OTHER; note = 2'-O-methylguanosine-3'-phosphate
  modified_base 13: mod_base = OTHER; note = 2'-O-methyluridine-3'-phosphate
  modified_base 14: mod_base = OTHER; note = 2'-deoxy-2'-fluorouridine-3'-phosphate
  modified_base 15: mod_base = OTHER; note = 2'-O-methylcytidine-3'-phosphate
  modified_base 16: mod_base = OTHER; note = 2'-deoxy-2'-fluoroadenosine-3'-phosphate
  modified_base 17: mod_base = OTHER; note = 2'-O-methyluridine-3'-phosphate
  modified_base 18: mod_base = OTHER; note = 2'-O-methylcytidine-3'-phosphate
  modified_base 19: mod_base = OTHER; note = 2'-O-methyladenosine-3'-phosphate
  modified_base 20: mod_base = OTHER; note = 2'-O-methyladenosine-3'-phosphate
  modified_base 21: mod_base = OTHER; note = 2'-O-methyladenosine-3'-phosphorothioate
  modified_base 22: mod_base = OTHER; note = 2'-O-methylguanosine-3'-phosphorothioate
  modified_base 23: mod_base = OTHER; note = 2'-O-methyladenosine
tagacatcgcagttcatcaaaga

SEQ ID NO: 721 - RNA, 23 nt, synthetic construct
  source 1..23: mol_type = other RNA
  modified_base 1: mod_base = OTHER; note = 2'-O-methyluridine-3'-phosphorothioate 5'-(E)-Vinylphosphonate
  modified_base 2: mod_base = OTHER; note = 2'-deoxy-2'-fluoroguanosine-3'-phosphorothioate
  modified_base 3: mod_base = OTHER; note = 2'-O-methyluridine-3'-phosphate
  modified_base 4: mod_base = OTHER; note = 2'-O-methyluridine-3'-phosphate
  modified_base 5: mod_base = OTHER; note = 2'-O-methylcytidine-3'-phosphate
  modified_base 6: mod_base = OTHER; note = 2'-deoxy-2'-fluorocytidine-3'-phosphate
  modified_base 7: mod_base = OTHER; note = 2'-O-methylcytidine-3'-phosphate
  modified_base 8: mod_base = OTHER; note = 2'-deoxy-2'-fluoroadenosine-3'-phosphate
  modified_base 9: mod_base = OTHER; note = 2'-deoxy-2'-fluoroguanosine-3'-phosphate
  modified_base 10: mod_base = OTHER; note = 2'-O-methyladenosine-3'-phosphate
  modified_base 11: mod_base = OTHER; note = 2'-O-methylcytidine-3'-phosphate
  modified_base 12: mod_base = OTHER; note = 2'-O-methyladenosine-3'-phosphate
  modified_base 13: mod_base = OTHER; note = 2'-O-methyluridine-3'-phosphate
  modified_base 14: mod_base = OTHER; note = 2'-deoxy-2'-fluorocytidine-3'-phosphate
  modified_base 15: mod_base = OTHER; note = 2'-O-methylguanosine-3'-phosphate
  modified_base 16: mod_base = OTHER; note = 2'-deoxy-2'-fluorocytidine-3'-phosphate
  modified_base 17: mod_base = OTHER; note = 2'-O-methyladenosine-3'-phosphate
  modified_base 18: mod_base = OTHER; note = 2'-O-methylguanosine-3'-phosphate
  modified_base 19: mod_base = OTHER; note = 2'-O-methyluridine-3'-phosphate
  modified_base 20: mod_base = OTHER; note = 2'-O-methyluridine-3'-phosphate
  modified_base 21: mod_base = OTHER; note = 2'-O-methylcytidine-3'-phosphorothioate
  modified_base 22: mod_base = OTHER; note = 2'-O-methyladenosine-3'-phosphorothioate
  modified_base 23: mod_base = OTHER; note = 2'-O-methyluridine
tgttcccagacatcgcagttcat

SEQ ID NO: 722 - RNA, 23 nt, synthetic construct
  source 1..23: mol_type = other RNA
  modified_base 1: mod_base = OTHER; note = 2'-O-methyluridine-3'-phosphorothioate 5'-(E)-Vinylphosphonate
  modified_base 2: mod_base = OTHER; note = 2'-deoxy-2'-fluoroadenosine-3'-phosphorothioate
  modified_base 3: mod_base = OTHER; note = 2'-O-methylguanosine-3'-phosphate
  modified_base 4: mod_base = OTHER; note = 2'-O-methylcytidine-3'-phosphate
  modified_base 5: mod_base = OTHER; note = 2'-O-methyluridine-3'-phosphate
  modified_base 6: mod_base = OTHER; note = 2'-deoxy-2'-fluoroguanosine-3'-phosphate
  modified_base 7: mod_base = OTHER; note = 2'-O-methylguanosine-3'-phosphate
  modified_base 8: mod_base = OTHER; note = 2'-deoxy-2'-fluoroguanosine-3'-phosphate
  modified_base 9: mod_base = OTHER; note = 2'-deoxy-2'-fluorouridine-3'-phosphate
  modified_base 10: mod_base = OTHER; note = 2'-O-methyluridine-3'-phosphate
  modified_base 11: mod_base = OTHER; note = 2'-O-methylcytidine-3'-phosphate
  modified_base 12: mod_base = OTHER; note = 2'-O-methylcytidine-3'-phosphate
  modified_base 13: mod_base = OTHER; note = 2'-O-methylcytidine-3'-phosphate
  modified_base 14: mod_base = OTHER; note = 2'-deoxy-2'-fluoroadenosine-3'-phosphate
  modified_base 15: mod_base = OTHER; note = 2'-O-methylguanosine-3'-phosphate
  modified_base 16: mod_base = OTHER; note = 2'-deoxy-2'-fluoroadenosine-3'-phosphate
  modified_base 17: mod_base = OTHER; note = 2'-O-methylcytidine-3'-phosphate
  modified_base 18: mod_base = OTHER; note = 2'-O-methyladenosine-3'-phosphate
  modified_base 19: mod_base = OTHER; note = 2'-O-methyluridine-3'-phosphate
  modified_base 20: mod_base = OTHER; note = 2'-O-methylcytidine-3'-phosphate
  modified_base 21: mod_base = OTHER; note = 2'-O-methylguanosine-3'-phosphorothioate
  modified_base 22: mod_base = OTHER; note = 2'-O-methylcytidine-3'-phosphorothioate
  modified_base 23: mod_base = OTHER; note = 2'-O-methyladenosine
tagctgggttcccagacatcgca

SEQ ID NO: 723 - RNA, 23 nt, synthetic construct
  source 1..23: mol_type = other RNA
  modified_base 1: mod_base = OTHER; note = 2'-O-methyluridine-3'-phosphorothioate 5'-(E)-Vinylphosphonate
  modified_base 2: mod_base = OTHER; note = 2'-deoxy-2'-fluorocytidine-3'-phosphorothioate
  modified_base 3: mod_base = OTHER; note = 2'-O-methylguanosine-3'-phosphate
  modified_base 4: mod_base = OTHER; note = 2'-O-methylguanosine-3'-phosphate
  modified_base 5: mod_base = OTHER; note = 2'-O-methyluridine-3'-phosphate
  modified_base 6: mod_base = OTHER; note = 2'-deoxy-2'-fluorouridine-3'-phosphate
  modified_base 7: mod_base = OTHER; note = 2'-O-methylguanosine-3'-phosphate
  modified_base 8: mod_base = OTHER; note = 2'-deoxy-2'-fluorouridine-3'-phosphate
  modified_base 9: mod_base = OTHER; note = 2'-deoxy-2'-fluorouridine-3'-phosphate
  modified_base 10: mod_base = OTHER; note = 2'-O-methyladenosine-3'-phosphate
  modified_base 11: mod_base = OTHER; note = 2'-O-methylguanosine-3'-phosphate
  modified_base 12: mod_base = OTHER; note = 2'-O-methylguanosine-3'-phosphate
  modified_base 13: mod_base = OTHER; note = 2'-O-methylcytidine-3'-phosphate
  modified_base 14: mod_base = OTHER; note = 2'-deoxy-2'-fluoroadenosine-3'-phosphate
  modified_base 15: mod_base = OTHER; note = 2'-O-methylguanosine-3'-phosphate
  modified_base 16: mod_base = OTHER; note = 2'-deoxy-2'-fluorocytidine-3'-phosphate
  modified_base 17: mod_base = OTHER; note = 2'-O-methyluridine-3'-phosphate
  modified_base 18: mod_base = OTHER; note = 2'-O-methylguanosine-3'-phosphate
  modified_base 19: mod_base = OTHER; note = 2'-O-methylguanosine-3'-phosphate
  modified_base 20: mod_base = OTHER; note = 2'-O-methylguanosine-3'-phosphate
  modified_base 21: mod_base = OTHER; note = 2'-O-methyluridine-3'-phosphorothioate
  modified_base 22: mod_base = OTHER; note = 2'-O-methyluridine-3'-phosphorothioate
  modified_base 23: mod_base = OTHER; note = 2'-O-methylcytidine
tcggttgttaggcagctgggttc

SEQ ID NO: 724 - RNA, 23 nt, synthetic construct
  source 1..23: mol_type = other RNA
  modified_base 1: mod_base = OTHER; note = 2'-O-methyluridine-3'-phosphorothioate 5'-(E)-Vinylphosphonate
  modified_base 2: mod_base = OTHER; note = 2'-deoxy-2'-fluoroadenosine-3'-phosphorothioate
  modified_base 3: mod_base = OTHER; note = 2'-O-methyladenosine-3'-phosphate
  modified_base 4: mod_base = OTHER; note = 2'-O-methylguanosine-3'-phosphate
  modified_base 5: mod_base = OTHER; note = 2'-O-methyluridine-3'-phosphate
  modified_base 6: mod_base = OTHER; note = 2'-deoxy-2'-fluoroguanosine-3'-phosphate
  modified_base 7: mod_base = OTHER; note = 2'-O-methylguanosine-3'-phosphate
  modified_base 8: mod_base = OTHER; note = 2'-deoxy-2'-fluoroguanosine-3'-phosphate
  modified_base 9: mod_base = OTHER; note = 2'-deoxy-2'-fluorocytidine-3'-phosphate
  modified_base 10: mod_base = OTHER; note = 2'-O-methylguanosine-3'-phosphate
  modified_base 11: mod_base = OTHER; note = 2'-O-methylguanosine-3'-phosphate
  modified_base 12: mod_base = OTHER; note = 2'-O-methyluridine-3'-phosphate
  modified_base 13: mod_base = OTHER; note = 2'-O-methyluridine-3'-phosphate
  modified_base 14: mod_base = OTHER; note = 2'-deoxy-2'-fluoroguanosine-3'-phosphate
  modified_base 15: mod_base = OTHER; note = 2'-O-methyluridine-3'-phosphate
  modified_base 16: mod_base = OTHER; note = 2'-deoxy-2'-fluorouridine-3'-phosphate
  modified_base 17: mod_base = OTHER; note = 2'-O-methyladenosine-3'-phosphate
  modified_base 18: mod_base = OTHER; note = 2'-O-methylguanosine-3'-phosphate
  modified_base 19: mod_base = OTHER; note = 2'-O-methylguanosine-3'-phosphate
  modified_base 20: mod_base = OTHER; note = 2'-O-methylcytidine-3'-phosphate
  modified_base 21: mod_base = OTHER; note = 2'-O-methyladenosine-3'-phosphorothioate
  modified_base 22: mod_base = OTHER; note = 2'-O-methylguanosine-3'-phosphorothioate
  modified_base 23: mod_base = OTHER; note = 2'-O-methylcytidine
taagtgggcggttgttaggcagc

SEQ ID NO: 725 - RNA, 23 nt, synthetic construct
  source 1..23: mol_type = other RNA
  modified_base 1: mod_base = OTHER; note = 2'-O-methyluridine-3'-phosphorothioate 5'-(E)-Vinylphosphonate
  modified_base 2: mod_base = OTHER; note = 2'-deoxy-2'-fluoroadenosine-3'-phosphorothioate
  modified_base 3: mod_base = OTHER; note = 2'-O-methylguanosine-3'-phosphate
  modified_base 4: mod_base = OTHER; note = 2'-O-methylcytidine-3'-phosphate
  modified_base 5: mod_base = OTHER; note = 2'-O-methyladenosine-3'-phosphate
  modified_base 6: mod_base = OTHER; note = 2'-deoxy-2'-fluorocytidine-3'-phosphate
  modified_base 7: mod_base = OTHER; note = 2'-O-methyluridine-3'-phosphate
  modified_base 8: mod_base = OTHER; note = 2'-deoxy-2'-fluoroguanosine-3'-phosphate
  modified_base 9: mod_base = OTHER; note = 2'-deoxy-2'-fluoroadenosine-3'-phosphate
  modified_base 10: mod_base = OTHER; note = 2'-O-methyladenosine-3'-phosphate
  modified_base 11: mod_base = OTHER; note = 2'-O-methylguanosine-3'-phosphate
  modified_base 12: mod_base = OTHER; note = 2'-O-methyluridine-3'-phosphate
  modified_base 13: mod_base = OTHER; note = 2'-O-methyluridine-3'-phosphate
  modified_base 14: mod_base = OTHER; note = 2'-deoxy-2'-fluoroguanosine-3'-phosphate
  modified_base 15: mod_base = OTHER; note = 2'-O-methyladenosine-3'-phosphate
  modified_base 16: mod_base = OTHER; note = 2'-deoxy-2'-fluoroadenosine-3'-phosphate
  modified_base 17: mod_base = OTHER; note = 2'-O-methylguanosine-3'-phosphate
  modified_base 18: mod_base = OTHER; note = 2'-O-methyladenosine-3'-phosphate
  modified_base 19: mod_base = OTHER; note = 2'-O-methylguanosine-3'-phosphate
  modified_base 20: mod_base = OTHER; note = 2'-O-methyladenosine-3'-phosphate
  modified_base 21: mod_base = OTHER; note = 2'-O-methylguanosine-3'-phosphorothioate
  modified_base 22: mod_base = OTHER; note = 2'-O-methylguanosine-3'-phosphorothioate
  modified_base 23: mod_base = OTHER; note = 2'-O-methylguanosine
tagcactgaagttgaagagaggg

SEQ ID NO: 726 - RNA, 23 nt, synthetic construct
  source 1..23: mol_type = other RNA
  modified_base 1: mod_base = OTHER; note = 2'-O-methyluridine-3'-phosphorothioate 5'-(E)-Vinylphosphonate
  modified_base 2: mod_base = OTHER; note = 2'-deoxy-2'-fluoroguanosine-3'-phosphorothioate
  modified_base 3: mod_base = OTHER; note = 2'-O-methyluridine-3'-phosphate
  modified_base 4: mod_base = OTHER; note = 2'-O-methyluridine-3'-phosphate
  modified_base 5: mod_base = OTHER; note = 2'-O-methylcytidine-3'-phosphate
  modified_base 6: mod_base = OTHER; note = 2'-deoxy-2'-fluoroadenosine-3'-phosphate
  modified_base 7: mod_base = OTHER; note = 2'-O-methylcytidine-3'-phosphate
  modified_base 8: mod_base = OTHER; note = 2'-deoxy-2'-fluorocytidine-3'-phosphate
  modified_base 9: mod_base = OTHER; note = 2'-deoxy-2'-fluoroadenosine-3'-phosphate
  modified_base 10: mod_base = OTHER; note = 2'-O-methylguanosine-3'-phosphate
  modified_base 11: mod_base = OTHER; note = 2'-O-methylcytidine-3'-phosphate
  modified_base 12: mod_base = OTHER; note = 2'-O-methyladenosine-3'-phosphate
  modified_base 13: mod_base = OTHER; note = 2'-O-methylcytidine-3'-phosphate
  modified_base 14: mod_base = OTHER; note = 2'-deoxy-2'-fluorouridine-3'-phosphate
  modified_base 15: mod_base = OTHER; note = 2'-O-methylguanosine-3'-phosphate
  modified_base 16: mod_base = OTHER; note = 2'-deoxy-2'-fluoroadenosine-3'-phosphate
  modified_base 17: mod_base = OTHER; note = 2'-O-methyladenosine-3'-phosphate
  modified_base 18: mod_base = OTHER; note = 2'-O-methylguanosine-3'-phosphate
  modified_base 19: mod_base = OTHER; note = 2'-O-methyluridine-3'-phosphate
  modified_base 20: mod_base = OTHER; note = 2'-O-methyluridine-3'-phosphate
  modified_base 21: mod_base = OTHER; note = 2'-O-methylguanosine-3'-phosphorothioate
  modified_base 22: mod_base = OTHER; note = 2'-O-methyladenosine-3'-phosphorothioate
  modified_base 23: mod_base = OTHER; note = 2'-O-methyladenosine
tgttcaccagcactgaagttgaa

SEQ ID NO: 727 - RNA, 23 nt, synthetic construct
  source 1..23: mol_type = other RNA
  modified_base 1: mod_base = OTHER; note = 2'-O-methyluridine-3'-phosphorothioate 5'-(E)-Vinylphosphonate
  modified_base 2: mod_base = OTHER; note = 2'-deoxy-2'-fluoroadenosine-3'-phosphorothioate
  modified_base 3: mod_base = OTHER; note = 2'-O-methyluridine-3'-phosphate
  modified_base 4: mod_base = OTHER; note = 2'-O-methylguanosine-3'-phosphate
  modified_base 5: mod_base = OTHER; note = 2'-O-methylguanosine-3'-phosphate
  modified_base 6: mod_base = OTHER; note = 2'-deoxy-2'-fluoroadenosine-3'-phosphate
  modified_base 7: mod_base = OTHER; note = 2'-O-methylguanosine-3'-phosphate
  modified_base 8: mod_base = OTHER; note = 2'-deoxy-2'-fluoroadenosine-3'-phosphate
  modified_base 9: mod_base = OTHER; note = 2'-deoxy-2'-fluoroguanosine-3'-phosphate
  modified_base 10: mod_base = OTHER; note = 2'-O-methyluridine-3'-phosphate
  modified_base 11: mod_base = OTHER; note = 2'-O-methyluridine-3'-phosphate
  modified_base 12: mod_base = OTHER; note = 2'-O-methylcytidine-3'-phosphate
  modified_base 13: mod_base = OTHER; note = 2'-O-methyladenosine-3'-phosphate
  modified_base 14: mod_base = OTHER; note = 2'-deoxy-2'-fluorocytidine-3'-phosphate
  modified_base 15: mod_base = OTHER; note = 2'-O-methylcytidine-3'-phosphate
  modified_base 16: mod_base = OTHER; note = 2'-deoxy-2'-fluoroadenosine-3'-phosphate
  modified_base 17: mod_base = OTHER; note = 2'-O-methylguanosine-3'-phosphate
  modified_base 18: mod_base = OTHER; note = 2'-O-methylcytidine-3'-phosphate
  modified_base 19: mod_base = OTHER; note = 2'-O-methyladenosine-3'-phosphate
  modified_base 20: mod_base = OTHER; note = 2'-O-methylcytidine-3'-phosphate
  modified_base 21: mod_base = OTHER; note = 2'-O-methyluridine-3'-phosphorothioate
  modified_base 22: mod_base = OTHER; note = 2'-O-methylguanosine-3'-phosphorothioate
  modified_base 23: mod_base = OTHER; note = 2'-O-methyladenosine
tatggagagttcaccagcactga

SEQ ID NO: 728 - RNA, 23 nt, synthetic construct
  source 1..23: mol_type = other RNA
  modified_base 1: mod_base = OTHER; note = 2'-O-methyluridine-3'-phosphorothioate 5'-(E)-Vinylphosphonate
  modified_base 2: mod_base = OTHER; note = 2'-deoxy-2'-fluoroguanosine-3'-phosphorothioate
  modified_base 3: mod_base = OTHER; note = 2'-O-methylguanosine-3'-phosphate
  modified_base 4: mod_base = OTHER; note = 2'-O-methyluridine-3'-phosphate
  modified_base 5: mod_base = OTHER; note = 2'-O-methyluridine-3'-phosphate
  modified_base 6: mod_base = OTHER; note = 2'-deoxy-2'-fluoroguanosine-3'-phosphate
  modified_base 7: mod_base = OTHER; note = 2'-O-methylguanosine-3'-phosphate
  modified_base 8: mod_base = OTHER; note = 2'-deoxy-2'-fluoroadenosine-3'-phosphate
  modified_base 9: mod_base = OTHER; note = 2'-deoxy-2'-fluorouridine-3'-phosphate
  modified_base 10: mod_base = OTHER; note = 2'-O-methylguanosine-3'-phosphate
  modified_base 11: mod_base = OTHER; note = 2'-O-methylguanosine-3'-phosphate
  modified_base 12: mod_base = OTHER; note = 2'-O-methyladenosine-3'-phosphate
  modified_base 13: mod_base = OTHER; note = 2'-O-methylguanosine-3'-phosphate
  modified_base 14: mod_base = OTHER; note = 2'-deoxy-2'-fluoroadenosine-3'-phosphate
  modified_base 15: mod_base = OTHER; note = 2'-O-methylguanosine-3'-phosphate
  modified_base 16: mod_base = OTHER; note = 2'-deoxy-2'-fluorouridine-3'-phosphate
  modified_base 17: mod_base = OTHER; note = 2'-O-methyluridine-3'-phosphate
  modified_base 18: mod_base = OTHER; note = 2'-O-methylcytidine-3'-phosphate
  modified_base 19: mod_base = OTHER; note = 2'-O-methyladenosine-3'-phosphate
  modified_base 20: mod_base = OTHER; note = 2'-O-methylcytidine-3'-phosphate
  modified_base 21: mod_base = OTHER; note = 2'-O-methylcytidine-3'-phosphorothioate
  modified_base 22: mod_base = OTHER; note = 2'-O-methyladenosine-3'-phosphorothioate
  modified_base 23: mod_base = OTHER; note = 2'-O-methylguanosine
tggttggatggagagttcaccag

SEQ ID NO: 729 - RNA, 23 nt, synthetic construct
  source 1..23: mol_type = other RNA
  modified_base 1: mod_base = OTHER; note = 2'-O-methyluridine-3'-phosphorothioate 5'-(E)-Vinylphosphonate
  modified_base 2: mod_base = OTHER; note = 2'-deoxy-2'-fluorouridine-3'-phosphorothioate
  modified_base 3: mod_base = OTHER; note = 2'-O-methyluridine-3'-phosphate
  modified_base 4: mod_base = OTHER; note = 2'-O-methylguanosine-3'-phosphate
  modified_base 5: mod_base = OTHER; note = 2'-O-methyladenosine-3'-phosphate
  modified_base 6: mod_base = OTHER; note = 2'-deoxy-2'-fluoroguanosine-3'-phosphate
  modified_base 7: mod_base = OTHER; note = 2'-O-methyladenosine-3'-phosphate
  modified_base 8: mod_base = OTHER; note = 2'-deoxy-2'-fluoroguanosine-3'-phosphate
  modified_base 9: mod_base = OTHER; note = 2'-deoxy-2'-fluoroadenosine-3'-phosphate
  modified_base 10: mod_base = OTHER; note = 2'-O-methylcytidine-3'-phosphate
  modified_base 11: mod_base = OTHER; note = 2'-O-methylguanosine-3'-phosphate
  modified_base 12: mod_base = OTHER; note = 2'-O-methylguanosine-3'-phosphate
  modified_base 13: mod_base = OTHER; note = 2'-O-methyluridine-3'-phosphate
  modified_base 14: mod_base = OTHER; note = 2'-deoxy-2'-fluorouridine-3'-phosphate
  modified_base 15: mod_base = OTHER; note = 2'-O-methylguanosine-3'-phosphate
  modified_base 16: mod_base = OTHER; note = 2'-deoxy-2'-fluoroguanosine-3'-phosphate
  modified_base 17: mod_base = OTHER; note = 2'-O-methyladenosine-3'-phosphate
  modified_base 18: mod_base = OTHER; note = 2'-O-methyluridine-3'-phosphate
  modified_base 19: mod_base = OTHER; note = 2'-O-methylguanosine-3'-phosphate
  modified_base 20: mod_base = OTHER; note = 2'-O-methylguanosine-3'-phosphate
  modified_base 21: mod_base = OTHER; note = 2'-O-methyladenosine-3'-phosphorothioate
  modified_base 22: mod_base = OTHER; note = 2'-O-methylguanosine-3'-phosphorothioate
  modified_base 23: mod_base = OTHER; note = 2'-O-methyladenosine
tttgagagacggttggatggaga

SEQ ID NO: 730 - RNA, 23 nt, synthetic construct
  source 1..23: mol_type = other RNA
  modified_base 1: mod_base = OTHER; note = 2'-O-methyluridine-3'-phosphorothioate 5'-(E)-Vinylphosphonate
  modified_base 2: mod_base = OTHER; note = 2'-deoxy-2'-fluoroadenosine-3'-phosphorothioate
  modified_base 3: mod_base = OTHER; note = 2'-O-methyluridine-3'-phosphate
  modified_base 4: mod_base = OTHER; note = 2'-O-methylguanosine-3'-phosphate
  modified_base 5: mod_base = OTHER; note = 2'-O-methylguanosine-3'-phosphate
  modified_base 6: mod_base = OTHER; note = 2'-deoxy-2'-fluorocytidine-3'-phosphate
  modified_base 7: mod_base = OTHER; note = 2'-O-methylguanosine-3'-phosphate
  modified_base 8: mod_base = OTHER; note = 2'-deoxy-2'-fluorouridine-3'-phosphate
  modified_base 9: mod_base = OTHER; note = 2'-deoxy-2'-fluorouridine-3'-phosphate
  modified_base 10: mod_base = OTHER; note = 2'-O-methylguanosine-3'-phosphate
  modified_base 11: mod_base = OTHER; note = 2'-O-methyladenosine-3'-phosphate
  modified_base 12: mod_base = OTHER; note = 2'-O-methylguanosine-3'-phosphate
  modified_base 13: mod_base = OTHER; note = 2'-O-methyladenosine-3'-phosphate
  modified_base 14: mod_base = OTHER; note = 2'-deoxy-2'-fluoroguanosine-3'-phosphate
  modified_base 15: mod_base = OTHER; note = 2'-O-methyladenosine-3'-phosphate
  modified_base 16: mod_base = OTHER; note = 2'-deoxy-2'-fluorocytidine-3'-phosphate
  modified_base 17: mod_base = OTHER; note = 2'-O-methylguanosine-3'-phosphate
  modified_base 18: mod_base = OTHER; note = 2'-O-methylguanosine-3'-phosphate
  modified_base 19: mod_base = OTHER; note = 2'-O-methyluridine-3'-phosphate
  modified_base 20: mod_base = OTHER; note = 2'-O-methyluridine-3'-phosphate
  modified_base 21: mod_base = OTHER; note = 2'-O-methylguanosine-3'-phosphorothioate
  modified_base 22: mod_base = OTHER; note = 2'-O-methylguanosine-3'-phosphorothioate
  modified_base 23: mod_base = OTHER; note = 2'-O-methyladenosine
tatggcgttgagagacggttgga

SEQ ID NO: 731 - RNA, 23 nt, synthetic construct
  source 1..23: mol_type = other RNA
  modified_base 1: mod_base = OTHER; note = 2'-O-methyluridine-3'-phosphorothioate 5'-(E)-Vinylphosphonate
  modified_base 2: mod_base = OTHER; note = 2'-deoxy-2'-fluoroadenosine-3'-phosphorothioate
  modified_base 3: mod_base = OTHER; note = 2'-O-methyluridine-3'-phosphate
  modified_base 4: mod_base = OTHER; note = 2'-O-methylguanosine-3'-phosphate
  modified_base 5: mod_base = OTHER; note = 2'-O-methyladenosine-3'-phosphate
  modified_base 6: mod_base = OTHER; note = 2'-deoxy-2'-fluoroguanosine-3'-phosphate
  modified_base 7: mod_base = OTHER; note = 2'-O-methyladenosine-3'-phosphate
  modified_base 8: mod_base = OTHER; note = 2'-deoxy-2'-fluoroadenosine-3'-phosphate
  modified_base 9: mod_base = OTHER; note = 2'-deoxy-2'-fluorouridine-3'-phosphate
  modified_base 10: mod_base = OTHER; note = 2'-O-methylguanosine-3'-phosphate
  modified_base 11: mod_base = OTHER; note = 2'-O-methylguanosine-3'-phosphate
  modified_base 12: mod_base = OTHER; note = 2'-O-methylcytidine-3'-phosphate
  modified_base 13: mod_base = OTHER; note = 2'-O-methylguanosine-3'-phosphate
  modified_base 14: mod_base = OTHER; note = 2'-deoxy-2'-fluorouridine-3'-phosphate
  modified_base 15: mod_base = OTHER; note = 2'-O-methyluridine-3'-phosphate
  modified_base 16: mod_base = OTHER; note = 2'-deoxy-2'-fluoroguanosine-3'-phosphate
  modified_base 17: mod_base = OTHER; note = 2'-O-methyladenosine-3'-phosphate
  modified_base 18: mod_base = OTHER; note = 2'-O-methylguanosine-3'-phosphate
  modified_base 19: mod_base = OTHER; note = 2'-O-methyladenosine-3'-phosphate
  modified_base 20: mod_base = OTHER; note = 2'-O-methylguanosine-3'-phosphate
  modified_base 21: mod_base = OTHER; note = 2'-O-methyladenosine-3'-phosphorothioate
  modified_base 22: mod_base = OTHER; note = 2'-O-methylcytidine-3'-phosphorothioate
  modified_base 23: mod_base = OTHER; note = 2'-O-methylguanosine
tatgagaatggcgttgagagacg

SEQ ID NO: 732 - RNA, 23 nt, synthetic construct
  source 1..23: mol_type = other RNA
  modified_base 1: mod_base = OTHER; note = 2'-O-methyluridine-3'-phosphorothioate 5'-(E)-Vinylphosphonate
  modified_base 2: mod_base = OTHER; note = 2'-deoxy-2'-fluoroadenosine-3'-phosphorothioate
  modified_base 3: mod_base = OTHER; note = 2'-O-methylguanosine-3'-phosphate
  modified_base 4: mod_base = OTHER; note = 2'-O-methylguanosine-3'-phosphate
  modified_base 5: mod_base = OTHER; note = 2'-O-methyladenosine-3'-phosphate
  modified_base 6: mod_base = OTHER; note = 2'-deoxy-2'-fluoroguanosine-3'-phosphate
  modified_base 7: mod_base = OTHER; note = 2'-O-methylguanosine-3'-phosphate
  modified_base 8: mod_base = OTHER; note = 2'-deoxy-2'-fluoroguanosine-3'-phosphate
  modified_base 9: mod_base = OTHER; note = 2'-deoxy-2'-fluoroadenosine-3'-phosphate
  modified_base 10: mod_base = OTHER; note = 2'-O-methyluridine-3'-phosphate
  modified_base 11: mod_base = OTHER; note = 2'-O-methylguanosine-3'-phosphate
  modified_base 12: mod_base = OTHER; note = 2'-O-methyladenosine-3'-phosphate
  modified_base 13: mod_base = OTHER; note = 2'-O-methylguanosine-3'-phosphate
  modified_base 14: mod_base = OTHER; note = 2'-deoxy-2'-fluoroadenosine-3'-phosphate
  modified_base 15: mod_base = OTHER; note = 2'-O-methyladenosine-3'-phosphate
  modified_base 16: mod_base = OTHER; note = 2'-deoxy-2'-fluorouridine-3'-phosphate
  modified_base 17: mod_base = OTHER; note = 2'-O-methylguanosine-3'-phosphate
  modified_base 18: mod_base = OTHER; note = 2'-O-methylguanosine-3'-phosphate
  modified_base 19: mod_base = OTHER; note = 2'-O-methylcytidine-3'-phosphate
  modified_base 20: mod_base = OTHER; note = 2'-O-methylguanosine-3'-phosphate
  modified_base 21: mod_base = OTHER; note = 2'-O-methyluridine-3'-phosphorothioate
  modified_base 22: mod_base = OTHER; note = 2'-O-methyluridine-3'-phosphorothioate
  modified_base 23: mod_base = OTHER; note = 2'-O-methylguanosine
taggagggatgagaatggcgttg

SEQ ID NO: 733 - RNA, 23 nt, synthetic construct
  source 1..23: mol_type = other RNA
  modified_base 1: mod_base = OTHER; note = 2'-O-methyluridine-3'-phosphorothioate 5'-(E)-Vinylphosphonate
  modified_base 2: mod_base = OTHER; note = 2'-deoxy-2'-fluorocytidine-3'-phosphorothioate
  modified_base 3: mod_base = OTHER; note = 2'-O-methyladenosine-3'-phosphate
  modified_base 4: mod_base = OTHER; note = 2'-O-methylguanosine-3'-phosphate
  modified_base 5: mod_base = OTHER; note = 2'-O-methyluridine-3'-phosphate
  modified_base 6: mod_base = OTHER; note = 2'-deoxy-2'-fluorouridine-3'-phosphate
  modified_base 7: mod_base = OTHER; note = 2'-O-methyladenosine-3'-phosphate
  modified_base 8: mod_base = OTHER; note = 2'-deoxy-2'-fluoroadenosine-3'-phosphate
  modified_base 9: mod_base = OTHER; note = 2'-deoxy-2'-fluoroadenosine-3'-phosphate
  modified_base 10: mod_base = OTHER; note = 2'-O-methylguanosine-3'-phosphate
  modified_base 11: mod_base = OTHER; note = 2'-O-methylcytidine-3'-phosphate
  modified_base 12: mod_base = OTHER; note = 2'-O-methyluridine-3'-phosphate
  modified_base 13: mod_base = OTHER; note = 2'-O-methyluridine-3'-phosphate
  modified_base 14: mod_base = OTHER; note = 2'-deoxy-2'-fluoroguanosine-3'-phosphate
  modified_base 15: mod_base = OTHER; note = 2'-O-methyluridine-3'-phosphate
  modified_base 16: mod_base = OTHER; note = 2'-deoxy-2'-fluoroguanosine-3'-phosphate
  modified_base 17: mod_base = OTHER; note = 2'-O-methyladenosine-3'-phosphate
  modified_base 18: mod_base = OTHER; note = 2'-O-methylguanosine-3'-phosphate
  modified_base 19: mod_base = OTHER; note = 2'-O-methylguanosine-3'-phosphate
  modified_base 20: mod_base = OTHER; note = 2'-O-methyladenosine-3'-phosphate
  modified_base 21: mod_base = OTHER; note = 2'-O-methylcytidine-3'-phosphorothioate
  modified_base 22: mod_base = OTHER; note = 2'-O-methylguanosine-3'-phosphorothioate
  modified_base 23: mod_base = OTHER; note = 2'-O-methylguanosine
tcagttaaagcttgtgaggacgg

SEQ ID NO: 734 - RNA, 23 nt, synthetic construct
  source 1..23: mol_type = other RNA
  modified_base 1: mod_base = OTHER; note = 2'-O-methyluridine-3'-phosphorothioate 5'-(E)-Vinylphosphonate
  modified_base 2: mod_base = OTHER; note = 2'-deoxy-2'-fluorouridine-3'-phosphorothioate
  modified_base 3: mod_base = OTHER; note = 2'-O-methylcytidine-3'-phosphate
  modified_base 4: mod_base = OTHER; note = 2'-O-methyladenosine-3'-phosphate
  modified_base 5: mod_base = OTHER; note = 2'-O-methyladenosine-3'-phosphate
  modified_base 6: mod_base = OTHER; note = 2'-deoxy-2'-fluoroguanosine-3'-phosphate
  modified_base 7: mod_base = OTHER; note = 2'-O-methyluridine-3'-phosphate
  modified_base 8: mod_base = OTHER; note = 2'-deoxy-2'-fluoroguanosine-3'-phosphate
  modified_base 9: mod_base = OTHER; note = 2'-deoxy-2'-fluoroadenosine-3'-phosphate
  modified_base 10: mod_base = OTHER; note = 2'-O-methylguanosine-3'-phosphate
  modified_base 11: mod_base = OTHER; note = 2'-O-methylguanosine-3'-phosphate
  modified_base 12: mod_base = OTHER; note = 2'-O-methyladenosine-3'-phosphate
  modified_base 13: mod_base = OTHER; note = 2'-O-methylguanosine-3'-phosphate
  modified_base 14: mod_base = OTHER; note = 2'-deoxy-2'-fluoroguanosine-3'-phosphate
  modified_base 15: mod_base = OTHER; note = 2'-O-methylguanosine-3'-phosphate
  modified_base 16: mod_base = OTHER; note = 2'-deoxy-2'-fluoroadenosine-3'-phosphate
  modified_base 17: mod_base = OTHER; note = 2'-O-methyluridine-3'-phosphate
  modified_base 18: mod_base = OTHER; note = 2'-O-methylguanosine-3'-phosphate
  modified_base 19: mod_base = OTHER; note = 2'-O-methyladenosine-3'-phosphate
  modified_base 20: mod_base = OTHER; note = 2'-O-methylguanosine-3'-phosphate
  modified_base 21: mod_base = OTHER; note = 2'-O-methyladenosine-3'-phosphorothioate
  modified_base 22: mod_base = OTHER; note = 2'-O-methyladenosine-3'-phosphorothioate
  modified_base 23: mod_base = OTHER; note = 2'-O-methyluridine
ttcaagtgaggagggatgagaat

SEQ ID NO: 735 - RNA, 23 nt, synthetic construct
  source 1..23: mol_type = other RNA
  modified_base 1: mod_base = OTHER; note = 2'-O-methyluridine-3'-phosphorothioate 5'-(E)-Vinylphosphonate
  modified_base 2: mod_base = OTHER; note = 2'-deoxy-2'-fluoroguanosine-3'-phosphorothioate
  modified_base 3: mod_base = OTHER; note = 2'-O-methyladenosine-3'-phosphate
  modified_base 4: mod_base = OTHER; note = 2'-O-methylguanosine-3'-phosphate
  modified_base 5: mod_base = OTHER; note = 2'-O-methyluridine-3'-phosphate
  modified_base 6: mod_base = OTHER; note = 2'-deoxy-2'-fluorocytidine-3'-phosphate
  modified_base 7: mod_base = OTHER; note = 2'-O-methyluridine-3'-phosphate
  modified_base 8: mod_base = OTHER; note = 2'-deoxy-2'-fluorocytidine-3'-phosphate
  modified_base 9: mod_base = OTHER; note = 2'-deoxy-2'-fluoroadenosine-3'-phosphate
  modified_base 10: mod_base = OTHER; note = 2'-O-methylguanosine-3'-phosphate
  modified_base 11: mod_base = OTHER; note = 2'-O-methyluridine-3'-phosphate
  modified_base 12: mod_base = OTHER; note = 2'-O-methyluridine-3'-phosphate
  modified_base 13: mod_base = OTHER; note = 2'-O-methyladenosine-3'-phosphate
  modified_base 14: mod_base = OTHER; note = 2'-deoxy-2'-fluoroadenosine-3'-phosphate
  modified_base 15: mod_base = OTHER; note = 2'-O-methyladenosine-3'-phosphate
  modified_base 16: mod_base = OTHER; note = 2'-deoxy-2'-fluoroguanosine-3'-phosphate
  modified_base 17: mod_base = OTHER; note = 2'-O-methylcytidine-3'-phosphate
  modified_base 18: mod_base = OTHER; note = 2'-O-methyluridine-3'-phosphate
  modified_base 19: mod_base = OTHER; note = 2'-O-methyluridine-3'-phosphate
  modified_base 20: mod_base = OTHER; note = 2'-O-methylguanosine-3'-phosphate
  modified_base 21: mod_base = OTHER; note = 2'-O-methyluridine-3'-phosphorothioate
  modified_base 22: mod_base = OTHER; note = 2'-O-methylguanosine-3'-phosphorothioate
  modified_base 23: mod_base = OTHER; note = 2'-O-methyladenosine
tgagtctcagttaaagcttgtga

SEQ ID NO: 736 - RNA, 23 nt, synthetic construct
  source 1..23: mol_type = other RNA
  modified_base 1: mod_base = OTHER; note = 2'-O-methyluridine-3'-phosphorothioate 5'-(E)-Vinylphosphonate
  modified_base 2: mod_base = OTHER; note = 2'-deoxy-2'-fluorouridine-3'-phosphorothioate
  modified_base 3: mod_base = OTHER; note = 2'-O-methylguanosine-3'-phosphate
  modified_base 4: mod_base = OTHER; note = 2'-O-methylguanosine-3'-phosphate
  modified_base 5: mod_base = OTHER; note = 2'-O-methyluridine-3'-phosphate
  modified_base 6: mod_base = OTHER; note = 2'-deoxy-2'-fluorocytidine-3'-phosphate
  modified_base 7: mod_base = OTHER; note = 2'-O-methylguanosine-3'-phosphate
  modified_base 8: mod_base = OTHER; note = 2'-deoxy-2'-fluoroguanosine-3'-phosphate
  modified_base 9: mod_base = OTHER; note = 2'-deoxy-2'-fluoroadenosine-3'-phosphate
  modified_base 10: mod_base = OTHER; note = 2'-O-methylguanosine-3'-phosphate
  modified_base 11: mod_base = OTHER; note = 2'-O-methyluridine-3'-phosphate
  modified_base 12: mod_base = OTHER; note = 2'-O-methylcytidine-3'-phosphate
  modified_base 13: mod_base = OTHER; note = 2'-O-methyluridine-3'-phosphate
  modified_base 14: mod_base = OTHER; note = 2'-deoxy-2'-fluorocytidine-3'-phosphate
  modified_base 15: mod_base = OTHER; note = 2'-O-methyladenosine-3'-phosphate
  modified_base 16: mod_base = OTHER; note = 2'-deoxy-2'-fluoroguanosine-3'-phosphate
  modified_base 17: mod_base = OTHER; note = 2'-O-methyluridine-3'-phosphate
  modified_base 18: mod_base = OTHER; note = 2'-O-methyluridine-3'-phosphate
  modified_base 19: mod_base = OTHER; note = 2'-O-methyladenosine-3'-phosphate
  modified_base 20: mod_base = OTHER; note = 2'-O-methyladenosine-3'-phosphate
  modified_base 21: mod_base = OTHER; note = 2'-O-methyladenosine-3'-phosphorothioate
  modified_base 22: mod_base = OTHER; note = 2'-O-methylguanosine-3'-phosphorothioate
  modified_base 23: mod_base = OTHER; note = 2'-O-methylcytidine
ttggtcggagtctcagttaaagc

SEQ ID NO: 737 - RNA, 23 nt, synthetic construct
  source 1..23: mol_type = other RNA
  modified_base 1: mod_base = OTHER; note = 2'-O-methyluridine-3'-phosphorothioate 5'-(E)-Vinylphosphonate
  modified_base 2: mod_base = OTHER; note = 2'-deoxy-2'-fluorocytidine-3'-phosphorothioate
  modified_base 3: mod_base = OTHER; note = 2'-O-methylguanosine-3'-phosphate
  modified_base 4: mod_base = OTHER; note = 2'-O-methyladenosine-3'-phosphate
  modified_base 5: mod_base = OTHER; note = 2'-O-methylcytidine-3'-phosphate
  modified_base 6: mod_base = OTHER; note = 2'-deoxy-2'-fluorouridine-3'-phosphate
  modified_base 7: mod_base = OTHER; note = 2'-O-methylguanosine-3'-phosphate
  modified_base 8: mod_base = OTHER; note = 2'-deoxy-2'-fluorocytidine-3'-phosphate
  modified_base 9: mod_base = OTHER; note = 2'-deoxy-2'-fluorocytidine-3'-phosphate
  modified_base 10: mod_base = OTHER; note = 2'-O-methyladenosine-3'-phosphate
  modified_base 11: mod_base = OTHER; note = 2'-O-methylguanosine-3'-phosphate
  modified_base 12: mod_base = OTHER; note = 2'-O-methyluridine-3'-phosphate
  modified_base 13: mod_base = OTHER; note = 2'-O-methylcytidine-3'-phosphate
  modified_base 14: mod_base = OTHER; note = 2'-deoxy-2'-fluorouridine-3'-phosphate
  modified_base 15: mod_base = OTHER; note = 2'-O-methylguanosine-3'-phosphate
  modified_base 16: mod_base = OTHER; note = 2'-deoxy-2'-fluoroadenosine-3'-phosphate
  modified_base 17: mod_base = OTHER; note = 2'-O-methylguanosine-3'-phosphate
  modified_base 18: mod_base = OTHER; note = 2'-O-methylcytidine-3'-phosphate
  modified_base 19: mod_base = OTHER; note = 2'-O-methyluridine-3'-phosphate
  modified_base 20: mod_base = OTHER; note = 2'-O-methylguanosine-3'-phosphate
  modified_base 21: mod_base = OTHER; note = 2'-O-methylguanosine-3'-phosphorothioate
  modified_base 22: mod_base = OTHER; note = 2'-O-methyluridine-3'-phosphorothioate
  modified_base 23: mod_base = OTHER; note = 2'-O-methylcytidine
tcgactgccagtctgagctggtc

SEQ ID NO: 738 - RNA, 23 nt, synthetic construct
  source 1..23: mol_type = other RNA
  modified_base 1: mod_base = OTHER; note = 2'-O-methyluridine-3'-phosphorothioate 5'-(E)-Vinylphosphonate
  modified_base 2: mod_base = OTHER; note = 2'-deoxy-2'-fluoroguanosine-3'-phosphorothioate
  modified_base 3: mod_base = OTHER; note = 2'-O-methyluridine-3'-phosphate
  modified_base 4: mod_base = OTHER; note = 2'-O-methylguanosine-3'-phosphate
  modified_base 5: mod_base = OTHER; note = 2'-O-methylguanosine-3'-phosphate
  modified_base 6: mod_base = OTHER; note = 2'-deoxy-2'-fluorocytidine-3'-phosphate
  modified_base 7: mod_base = OTHER; note = 2'-O-methyladenosine-3'-phosphate
  modified_base 8: mod_base = OTHER; note = 2'-deoxy-2'-fluorouridine-3'-phosphate
  modified_base 9: mod_base = OTHER; note = 2'-deoxy-2'-fluorocytidine-3'-phosphate
  modified_base 10: mod_base = OTHER; note = 2'-O-methylguanosine-3'-phosphate
  modified_base 11: mod_base = OTHER; note = 2'-O-methylguanosine-3'-phosphate
  modified_base 12: mod_base = OTHER; note = 2'-O-methyluridine-3'-phosphate
  modified_base 13: mod_base = OTHER; note = 2'-O-methylcytidine-3'-phosphate
  modified_base 14: mod_base = OTHER; note = 2'-deoxy-2'-fluoroguanosine-3'-phosphate
  modified_base 15: mod_base = OTHER; note = 2'-O-methyladenosine-3'-phosphate
  modified_base 16: mod_base = OTHER; note = 2'-deoxy-2'-fluorocytidine-3'-phosphate
  modified_base 17: mod_base = OTHER; note = 2'-O-methyluridine-3'-phosphate
  modified_base 18: mod_base = OTHER; note = 2'-O-methylguanosine-3'-phosphate
  modified_base 19: mod_base = OTHER; note = 2'-O-methylcytidine-3'-phosphate
  modified_base 20: mod_base = OTHER; note = 2'-O-methylcytidine-3'-phosphate
  modified_base 21: mod_base = OTHER; note = 2'-O-methyladenosine-3'-phosphorothioate
  modified_base 22: mod_base = OTHER; note = 2'-O-methylguanosine-3'-phosphorothioate
  modified_base 23: mod_base = OTHER; note = 2'-O-methyluridine
tgtggcatcggtcgactgccagt

SEQ ID NO: 739 - RNA, 23 nt, synthetic construct
  source 1..23: mol_type = other RNA
  modified_base 1: mod_base = OTHER; note = 2'-O-methyluridine-3'-phosphorothioate 5'-(E)-Vinylphosphonate
  modified_base 2: mod_base = OTHER; note = 2'-deoxy-2'-fluoroguanosine-3'-phosphorothioate
  modified_base 3: mod_base = OTHER; note = 2'-O-methyluridine-3'-phosphate
  modified_base 4: mod_base = OTHER; note = 2'-O-methyladenosine-3'-phosphate
  modified_base 5: mod_base = OTHER; note = 2'-O-methylguanosine-3'-phosphate
  modified_base 6: mod_base = OTHER; note = 2'-deoxy-2'-fluoroguanosine-3'-phosphate
  modified_base 7: mod_base = OTHER; note = 2'-O-methyluridine-3'-phosphate
  modified_base 8: mod_base = OTHER; note = 2'-deoxy-2'-fluoroguanosine-3'-phosphate
  modified_base 9: mod_base = OTHER; note = 2'-deoxy-2'-fluorouridine-3'-phosphate
  modified_base 10: mod_base = OTHER; note = 2'-O-methylguanosine-3'-phosphate
  modified_base 11: mod_base = OTHER; note = 2'-O-methylguanosine-3'-phosphate
  modified_base 12: mod_base = OTHER; note = 2'-O-methylcytidine-3'-phosphate
  modified_base 13: mod_base = OTHER; note = 2'-O-methyladenosine-3'-phosphate
  modified_base 14: mod_base = OTHER; note = 2'-deoxy-2'-fluorouridine-3'-phosphate
  modified_base 15: mod_base = OTHER; note = 2'-O-methylcytidine-3'-phosphate
  modified_base 16: mod_base = OTHER; note = 2'-deoxy-2'-fluoroguanosine-3'-phosphate
  modified_base 17: mod_base = OTHER; note = 2'-O-methylguanosine-3'-phosphate
  modified_base 18: mod_base = OTHER; note = 2'-O-methyluridine-3'-phosphate
  modified_base 19: mod_base = OTHER; note = 2'-O-methylcytidine-3'-phosphate
  modified_base 20: mod_base = OTHER; note = 2'-O-methylguanosine-3'-phosphate
  modified_base 21: mod_base = OTHER; note = 2'-O-methyladenosine-3'-phosphorothioate
  modified_base 22: mod_base = OTHER; note = 2'-O-methylcytidine-3'-phosphorothioate
  modified_base 23: mod_base = OTHER; note = 2'-O-methyluridine
tgtaggtgtggcatcggtcgact

SEQ ID NO: 740 - RNA, 23 nt, synthetic construct
  source 1..23: mol_type = other RNA
  modified_base 1: mod_base = OTHER; note = 2'-O-methyluridine-3'-phosphorothioate 5'-(E)-Vinylphosphonate
  modified_base 2: mod_base = OTHER; note = 2'-deoxy-2'-fluoroadenosine-3'-phosphorothioate
  modified_base 3: mod_base = OTHER; note = 2'-O-methylguanosine-3'-phosphate
  modified_base 4: mod_base = OTHER; note = 2'-O-methyluridine-3'-phosphate
  modified_base 5: mod_base = OTHER; note = 2'-O-methylguanosine-3'-phosphate
  modified_base 6: mod_base = OTHER; note = 2'-deoxy-2'-fluoroadenosine-3'-phosphate
  modified_base 7: mod_base = OTHER; note = 2'-O-methylguanosine-3'-phosphate
  modified_base 8: mod_base = OTHER; note = 2'-deoxy-2'-fluoroguanosine-3'-phosphate
  modified_base 9: mod_base = OTHER; note = 2'-deoxy-2'-fluoroguanosine-3'-phosphate
  modified_base 10: mod_base = OTHER; note = 2'-O-methyluridine-3'-phosphate
  modified_base 11: mod_base = OTHER; note = 2'-O-methyladenosine-3'-phosphate
  modified_base 12: mod_base = OTHER; note = 2'-O-methylguanosine-3'-phosphate
  modified_base 13: mod_base = OTHER; note = 2'-O-methylguanosine-3'-phosphate
  modified_base 14: mod_base = OTHER; note = 2'-deoxy-2'-fluorouridine-3'-phosphate
  modified_base 15: mod_base = OTHER; note = 2'-O-methylguanosine-3'-phosphate
  modified_base 16: mod_base = OTHER; note = 2'-deoxy-2'-fluorouridine-3'-phosphate
  modified_base 17: mod_base = OTHER; note = 2'-O-methylguanosine-3'-phosphate
  modified_base 18: mod_base = OTHER; note = 2'-O-methylguanosine-3'-phosphate
  modified_base 19: mod_base = OTHER; note = 2'-O-methylcytidine-3'-phosphate
  modified_base 20: mod_base = OTHER; note = 2'-O-methyladenosine-3'-phosphate
  modified_base 21: mod_base = OTHER; note = 2'-O-methyluridine-3'-phosphorothioate
  modified_base 22: mod_base = OTHER; note = 2'-O-methylcytidine-3'-phosphorothioate
  modified_base 23: mod_base = OTHER; note = 2'-O-methylguanosine
tagtgagggtaggtgtggcatcg

SEQ ID NO: 741 - RNA, 23 nt, synthetic construct
  source 1..23: mol_type = other RNA
  modified_base 1: mod_base = OTHER; note = 2'-O-methyluridine-3'-phosphorothioate 5'-(E)-Vinylphosphonate
  modified_base 2: mod_base = OTHER; note = 2'-deoxy-2'-fluoroadenosine-3'-phosphorothioate
  modified_base 3: mod_base = OTHER; note = 2'-O-methylguanosine-3'-phosphate
  modified_base 4: mod_base = OTHER; note = 2'-O-methylguanosine-3'-phosphate
  modified_base 5: mod_base = OTHER; note = 2'-O-methyladenosine-3'-phosphate
  modified_base 6: mod_base = OTHER; note = 2'-deoxy-2'-fluoroguanosine-3'-phosphate
  modified_base 7: mod_base = OTHER; note = 2'-O-methyluridine-3'-phosphate
  modified_base 8: mod_base = OTHER; note = 2'-deoxy-2'-fluorouridine-3'-phosphate
  modified_base 9: mod_base = OTHER; note = 2'-deoxy-2'-fluoroadenosine-3'-phosphate
  modified_base 10: mod_base = OTHER; note = 2'-O-methylguanosine-3'-phosphate
  modified_base 11: mod_base = OTHER; note = 2'-O-methyluridine-3'-phosphate
  modified_base 12: mod_base = OTHER; note = 2'-O-methylguanosine-3'-phosphate
  modified_base 13: mod_base = OTHER; note = 2'-O-methyladenosine-3'-phosphate
  modified_base 14: mod_base = OTHER; note = 2'-deoxy-2'-fluoroguanosine-3'-phosphate
  modified_base 15: mod_base = OTHER; note = 2'-O-methylguanosine-3'-phosphate
  modified_base 16: mod_base = OTHER; note = 2'-deoxy-2'-fluoroguanosine-3'-phosphate
  modified_base 17: mod_base = OTHER; note = 2'-O-methyluridine-3'-phosphate
  modified_base 18: mod_base = OTHER; note = 2'-O-methyladenosine-3'-phosphate
  modified_base 19: mod_base = OTHER; note = 2'-O-methylguanosine-3'-phosphate
  modified_base 20: mod_base = OTHER; note = 2'-O-methylguanosine-3'-phosphate
  modified_base 21: mod_base = OTHER; note = 2'-O-methyluridine-3'-phosphorothioate
  modified_base 22: mod_base = OTHER; note = 2'-O-methylguanosine-3'-phosphorothioate
  modified_base 23: mod_base = OTHER; note = 2'-O-methyluridine
taggagttagtgagggtaggtgt

SEQ ID NO: 742 - RNA, 23 nt, synthetic construct
  source 1..23: mol_type = other RNA
  modified_base 1: mod_base = OTHER; note = 2'-O-methyluridine-3'-phosphorothioate 5'-(E)-Vinylphosphonate
  modified_base 2: mod_base = OTHER; note = 2'-deoxy-2'-fluorocytidine-3'-phosphorothioate
  modified_base 3: mod_base = OTHER; note = 2'-O-methyluridine-3'-phosphate
  modified_base 4: mod_base = OTHER; note = 2'-O-methylcytidine-3'-phosphate
  modified_base 5: mod_base = OTHER; note = 2'-O-methyladenosine-3'-phosphate
  modified_base 6: mod_base = OTHER; note = 2'-deoxy-2'-fluoroguanosine-3'-phosphate
  modified_base 7: mod_base = OTHER; note = 2'-O-methylguanosine-3'-phosphate
  modified_base 8: mod_base = OTHER; note = 2'-deoxy-2'-fluoroadenosine-3'-phosphate
  modified_base 9: mod_base = OTHER; note = 2'-deoxy-2'-fluoroguanosine-3'-phosphate
  modified_base 10: mod_base = OTHER; note = 2'-O-methylguanosine-3'-phosphate
  modified_base 11: mod_base = OTHER; note = 2'-O-methyladenosine-3'-phosphate
  modified_base 12: mod_base = OTHER; note = 2'-O-methylguanosine-3'-phosphate
  modified_base 13: mod_base = OTHER; note = 2'-O-methyluridine-3'-phosphate
  modified_base 14: mod_base = OTHER; note = 2'-deoxy-2'-fluorouridine-3'-phosphate
  modified_base 15: mod_base = OTHER; note = 2'-O-methyladenosine-3'-phosphate
  modified_base 16: mod_base = OTHER; note = 2'-deoxy-2'-fluoroguanosine-3'-phosphate
  modified_base 17: mod_base = OTHER; note = 2'-O-methyluridine-3'-phosphate
  modified_base 18: mod_base = OTHER; note = 2'-O-methylguanosine-3'-phosphate
  modified_base 19: mod_base = OTHER; note = 2'-O-methyladenosine-3'-phosphate
  modified_base 20: mod_base = OTHER; note = 2'-O-methylguanosine-3'-phosphate
  modified_base 21: mod_base = OTHER; note = 2'-O-methylguanosine-3'-phosphorothioate
  modified_base 22: mod_base = OTHER; note = 2'-O-methylguanosine-3'-phosphorothioate
  modified_base 23: mod_base = OTHER; note = 2'-O-methyluridine
tctcaggaggagttagtgagggt

SEQ ID NO: 743 - RNA, 23 nt, synthetic construct
  source 1..23: mol_type = other RNA
  modified_base 1: mod_base = OTHER; note = 2'-O-methyluridine-3'-phosphorothioate 5'-(E)-Vinylphosphonate
  modified_base 2: mod_base = OTHER; note = 2'-deoxy-2'-fluoroadenosine-3'-phosphorothioate
  modified_base 3: mod_base = OTHER; note = 2'-O-methyladenosine-3'-phosphate
  modified_base 4: mod_base = OTHER; note = 2'-O-methylguanosine-3'-phosphate
  modified_base 5: mod_base = OTHER; note = 2'-O-methyluridine-3'-phosphate
  modified_base 6: mod_base = OTHER; note = 2'-deoxy-2'-fluoroguanosine-3'-phosphate
  modified_base 7: mod_base = OTHER; note = 2'-O-methylguanosine-3'-phosphate
  modified_base 8: mod_base = OTHER; note = 2'-deoxy-2'-fluoroadenosine-3'-phosphate
  modified_base 9: mod_base = OTHER; note = 2'-deoxy-2'-fluoroadenosine-3'-phosphate
  modified_base 10: mod_base = OTHER; note = 2'-O-methylguanosine-3'-phosphate
  modified_base 11: mod_base = OTHER; note = 2'-O-methylguanosine-3'-phosphate
  modified_base 12: mod_base = OTHER; note = 2'-O-methylguanosine-3'-phosphate
  modified_base 13: mod_base = OTHER; note = 2'-O-methyluridine-3'-phosphate
  modified_base 14: mod_base = OTHER; note = 2'-deoxy-2'-fluoroguanosine-3'-phosphate
  modified_base 15: mod_base = OTHER; note = 2'-O-methylcytidine-3'-phosphate
  modified_base 16: mod_base = OTHER; note = 2'-deoxy-2'-fluorouridine-3'-phosphate
  modified_base 17: mod_base = OTHER; note = 2'-O-methyluridine-3'-phosphate
  modified_base 18: mod_base = OTHER; note = 2'-O-methylguanosine-3'-phosphate
  modified_base 19: mod_base = OTHER; note = 2'-O-methylguanosine-3'-phosphate
  modified_base 20: mod_base = OTHER; note = 2'-O-methyluridine-3'-phosphate
  modified_base 21: mod_base = OTHER; note = 2'-O-methylguanosine-3'-phosphorothioate
  modified_base 22: mod_base = OTHER; note = 2'-O-methylguanosine-3'-phosphorothioate
  modified_base 23: mod_base = OTHER; note = 2'-O-methylguanosine
taagtggaagggtgcttggtggg

SEQ ID NO: 744 - RNA, 23 nt, synthetic construct
  source 1..23: mol_type = other RNA
  modified_base 1: mod_base = OTHER; note = 2'-O-methyluridine-3'-phosphorothioate 5'-(E)-Vinylphosphonate
  modified_base 2: mod_base = OTHER; note = 2'-deoxy-2'-fluorocytidine-3'-phosphorothioate
  modified_base 3: mod_base = OTHER; note = 2'-O-methylcytidine-3'-phosphate
  modified_base 4: mod_base = OTHER; note = 2'-O-methyladenosine-3'-phosphate
  modified_base 5: mod_base = OTHER; note = 2'-O-methylguanosine-3'-phosphate
  modified_base 6: mod_base = OTHER; note = 2'-deoxy-2'-fluoroadenosine-3'-phosphate
  modified_base 7: mod_base = OTHER; note = 2'-O-methyluridine-3'-phosphate
  modified_base 8: mod_base = OTHER; note = 2'-deoxy-2'-fluoroguanosine-3'-phosphate
  modified_base 9: mod_base = OTHER; note = 2'-deoxy-2'-fluoroguanosine-3'-phosphate
  modified_base 10: mod_base = OTHER; note = 2'-O-methyladenosine-3'-phosphate
  modified_base 11: mod_base = OTHER; note = 2'-O-methyladenosine-3'-phosphate
  modified_base 12: mod_base = OTHER; note = 2'-O-methylguanosine-3'-phosphate
  modified_base 13: mod_base = OTHER; note = 2'-O-methyluridine-3'-phosphate
  modified_base 14: mod_base = OTHER; note = 2'-deoxy-2'-fluoroguanosine-3'-phosphate
  modified_base 15: mod_base = OTHER; note = 2'-O-methylguanosine-3'-phosphate
  modified_base 16: mod_base = OTHER; note = 2'-deoxy-2'-fluoroadenosine-3'-phosphate
  modified_base 17: mod_base = OTHER; note = 2'-O-methyladenosine-3'-phosphate
  modified_base 18: mod_base = OTHER; note = 2'-O-methylguanosine-3'-phosphate
  modified_base 19: mod_base = OTHER; note = 2'-O-methylguanosine-3'-phosphate
  modified_base 20: mod_base = OTHER; note = 2'-O-methylguanosine-3'-phosphate
  modified_base 21: mod_base = OTHER; note = 2'-O-methyluridine-3'-phosphorothioate
  modified_base 22: mod_base = OTHER; note = 2'-O-methylguanosine-3'-phosphorothioate
  modified_base 23: mod_base = OTHER; note = 2'-O-methylcytidine
tccagatggaagtggaagggtgc

SEQ ID NO: 745 - RNA, 23 nt, synthetic construct
  source 1..23: mol_type = other RNA
  modified_base 1: mod_base = OTHER; note = 2'-O-methyluridine-3'-phosphorothioate 5'-(E)-Vinylphosphonate
  modified_base 2: mod_base = OTHER; note = 2'-deoxy-2'-fluoroadenosine-3'-phosphorothioate
  modified_base 3: mod_base = OTHER; note = 2'-O-methylguanosine-3'-phosphate
  modified_base 4: mod_base = OTHER; note = 2'-O-methylguanosine-3'-phosphate
  modified_base 5: mod_base = OTHER; note = 2'-O-methyladenosine-3'-phosphate
  modified_base 6: mod_base = OTHER; note = 2'-deoxy-2'-fluoroguanosine-3'-phosphate
  modified_base 7: mod_base = OTHER; note = 2'-O-methylcytidine-3'-phosphate
  modified_base 8: mod_base = OTHER; note = 2'-deoxy-2'-fluorouridine-3'-phosphate
  modified_base 9: mod_base = OTHER; note = 2'-deoxy-2'-fluorouridine-3'-phosphate
  modified_base 10: mod_base = OTHER; note = 2'-O-methylguanosine-3'-phosphate
  modified_base 11: mod_base = OTHER; note = 2'-O-methyladenosine-3'-phosphate
  modified_base 12: mod_base = OTHER; note = 2'-O-methyluridine-3'-phosphate
  modified_base 13: mod_base = OTHER; note = 2'-O-methylguanosine-3'-phosphate
  modified_base 14: mod_base = OTHER; note = 2'-deoxy-2'-fluoroguanosine-3'-phosphate
  modified_base 15: mod_base = OTHER; note = 2'-O-methylguanosine-3'-phosphate
  modified_base 16: mod_base = OTHER; note = 2'-deoxy-2'-fluorocytidine-3'-phosphate
  modified_base 17: mod_base = OTHER; note = 2'-O-methyluridine-3'-phosphate
  modified_base 18: mod_base = OTHER; note = 2'-O-methyladenosine-3'-phosphate
  modified_base 19: mod_base = OTHER; note = 2'-O-methyluridine-3'-phosphate
  modified_base 20: mod_base = OTHER; note = 2'-O-methylguanosine-3'-phosphate
  modified_base 21: mod_base = OTHER; note = 2'-O-methylguanosine-3'-phosphorothioate
  modified_base 22: mod_base = OTHER; note = 2'-O-methylcytidine-3'-phosphorothioate
  modified_base 23: mod_base = OTHER; note = 2'-O-methylcytidine
taggagcttgatgggctatggcc

SEQ ID NO: 746 - RNA, 23 nt, synthetic construct
  source 1..23: mol_type = other RNA
  modified_base 1: mod_base = OTHER; note = 2'-O-methyluridine-3'-phosphorothioate 5'-(E)-Vinylphosphonate
  modified_base 2: mod_base = OTHER; note = 2'-deoxy-2'-fluoroadenosine-3'-phosphorothioate
  modified_base 3: mod_base = OTHER; note = 2'-O-methylguanosine-3'-phosphate
  modified_base 4: mod_base = OTHER; note = 2'-O-methylguanosine-3'-phosphate
  modified_base 5: mod_base = OTHER; note = 2'-O-methylguanosine-3'-phosphate
  modified_base 6: mod_base = OTHER; note = 2'-deoxy-2'-fluoroadenosine-3'-phosphate
  modified_base 7: mod_base = OTHER; note = 2'-O-methylcytidine-3'-phosphate
  modified_base 8: mod_base = OTHER; note = 2'-deoxy-2'-fluorouridine-3'-phosphate
  modified_base 9: mod_base = OTHER; note = 2'-deoxy-2'-fluorocytidine-3'-phosphate
  modified_base 10: mod_base = OTHER; note = 2'-O-methyladenosine-3'-phosphate
  modified_base 11: mod_base = OTHER; note = 2'-O-methyluridine-3'-phosphate
  modified_base 12: mod_base = OTHER; note = 2'-O-methyluridine-3'-phosphate
  modified_base 13: mod_base = OTHER; note = 2'-O-methyluridine-3'-phosphate
  modified_base 14: mod_base = OTHER; note = 2'-deoxy-2'-fluoroadenosine-3'-phosphate
  modified_base 15: mod_base = OTHER; note = 2'-O-methylcytidine-3'-phosphate
  modified_base 16: mod_base = OTHER; note = 2'-deoxy-2'-fluorocytidine-3'-phosphate
  modified_base 17: mod_base = OTHER; note = 2'-O-methyluridine-3'-phosphate
  modified_base 18: mod_base = OTHER; note = 2'-O-methylcytidine-3'-phosphate
  modified_base 19: mod_base = OTHER; note = 2'-O-methyluridine-3'-phosphate
  modified_base 20: mod_base = OTHER; note = 2'-O-methylguanosine-3'-phosphate
  modified_base 21: mod_base = OTHER; note = 2'-O-methylcytidine-3'-phosphorothioate
  modified_base 22: mod_base = OTHER; note = 2'-O-methylcytidine-3'-phosphorothioate
  modified_base 23: mod_base = OTHER; note = 2'-O-methylcytidine
tagggactcatttacctctgccc

SEQ ID NO: 747 - RNA, 23 nt, synthetic construct
  source 1..23: mol_type = other RNA
  modified_base 1: mod_base = OTHER; note = 2'-O-methyluridine-3'-phosphorothioate 5'-(E)-Vinylphosphonate
  modified_base 2: mod_base = OTHER; note = 2'-deoxy-2'-fluorocytidine-3'-phosphorothioate
  modified_base 3: mod_base = OTHER; note = 2'-O-methyladenosine-3'-phosphate
  modified_base 4: mod_base = OTHER; note = 2'-O-methylguanosine-3'-phosphate
  modified_base 5: mod_base = OTHER; note = 2'-O-methylguanosine-3'-phosphate
  modified_base 6: mod_base = OTHER; note = 2'-deoxy-2'-fluoroguanosine-3'-phosphate
  modified_base 7: mod_base = OTHER; note = 2'-O-methylcytidine-3'-phosphate
  modified_base 8: mod_base = OTHER; note = 2'-deoxy-2'-fluoroadenosine-3'-phosphate
  modified_base 9: mod_base = OTHER; note = 2'-deoxy-2'-fluoroguanosine-3'-phosphate
  modified_base 10: mod_base = OTHER; note = 2'-O-methylguanosine-3'-phosphate
  modified_base 11: mod_base = OTHER; note = 2'-O-methyladenosine-3'-phosphate
  modified_base 12: mod_base = OTHER; note = 2'-O-methylguanosine-3'-phosphate
  modified_base 13: mod_base = OTHER; note = 2'-O-methylcytidine-3'-phosphate
  modified_base 14: mod_base = OTHER; note = 2'-deoxy-2'-fluorouridine-3'-phosphate
  modified_base 15: mod_base = OTHER; note = 2'-O-methyluridine-3'-phosphate
  modified_base 16: mod_base = OTHER; note = 2'-deoxy-2'-fluoroguanosine-3'-phosphate
  modified_base 17: mod_base = OTHER; note = 2'-O-methyladenosine-3'-phosphate
  modified_base 18: mod_base = OTHER; note = 2'-O-methyluridine-3'-phosphate
  modified_base 19: mod_base = OTHER; note = 2'-O-methylguanosine-3'-phosphate
  modified_base 20: mod_base = OTHER; note = 2'-O-methylguanosine-3'-phosphate
  modified_base 21: mod_base = OTHER; note = 2'-O-methylguanosine-3'-phosphorothioate
  modified_base 22: mod_base = OTHER; note = 2'-O-methylcytidine-3'-phosphorothioate
  modified_base 23: mod_base = OTHER; note = 2'-O-methyluridine
tcagggcaggagcttgatgggct

SEQ ID NO: 748 - RNA, 23 nt, synthetic construct
  source 1..23: mol_type = other RNA
  modified_base 1: mod_base = OTHER; note = 2'-O-methyluridine-3'-phosphorothioate 5'-(E)-Vinylphosphonate
  modified_base 2: mod_base = OTHER; note = 2'-deoxy-2'-fluorouridine-3'-phosphorothioate
  modified_base 3: mod_base = OTHER; note = 2'-O-methylguanosine-3'-phosphate
  modified_base 4: mod_base = OTHER; note = 2'-O-methyladenosine-3'-phosphate
  modified_base 5: mod_base = OTHER; note = 2'-O-methylguanosine-3'-phosphate
  modified_base 6: mod_base = OTHER; note = 2'-deoxy-2'-fluoroguanosine-3'-phosphate
  modified_base 7: mod_base = OTHER; note = 2'-O-methylcytidine-3'-phosphate
  modified_base 8: mod_base = OTHER; note = 2'-deoxy-2'-fluorouridine-3'-phosphate
  modified_base 9: mod_base = OTHER; note = 2'-deoxy-2'-fluoroguanosine-3'-phosphate
  modified_base 10: mod_base = OTHER; note = 2'-O-methylguanosine-3'-phosphate
  modified_base 11: mod_base = OTHER; note = 2'-O-methyluridine-3'-phosphate
  modified_base 12: mod_base = OTHER; note = 2'-O-methylguanosine-3'-phosphate
  modified_base 13: mod_base = OTHER; note = 2'-O-methyladenosine-3'-phosphate
  modified_base 14: mod_base = OTHER; note = 2'-deoxy-2'-fluoroguanosine-3'-phosphate
  modified_base 15: mod_base = OTHER; note = 2'-O-methylguanosine-3'-phosphate
  modified_base 16: mod_base = OTHER; note = 2'-deoxy-2'-fluoroguanosine-3'-phosphate
  modified_base 17: mod_base = OTHER; note = 2'-O-methyladenosine-3'-phosphate
  modified_base 18: mod_base = OTHER; note = 2'-O-methylguanosine-3'-phosphate
  modified_base 19: mod_base = OTHER; note = 2'-O-methylguanosine-3'-phosphate
  modified_base 20: mod_base = OTHER; note = 2'-O-methylguanosine-3'-phosphate
  modified_base 21: mod_base = OTHER; note = 2'-O-methyladenosine-3'-phosphorothioate
  modified_base 22: mod_base = OTHER; note = 2'-O-methylcytidine-3'-phosphorothioate
  modified_base 23: mod_base = OTHER; note = 2'-O-methyluridine
ttgaggctggtgagggagggact

SEQ ID NO: 749 - RNA, 23 nt, synthetic construct
  source 1..23: mol_type = other RNA
  modified_base 1: mod_base = OTHER; note = 2'-O-methyluridine-3'-phosphorothioate 5'-(E)-Vinylphosphonate
  modified_base 2: mod_base = OTHER; note = 2'-deoxy-2'-fluorouridine-3'-phosphorothioate
  modified_base 3: mod_base = OTHER; note = 2'-O-methylcytidine-3'-phosphate
  modified_base 4: mod_base = OTHER; note = 2'-O-methyluridine-3'-phosphate
  modified_base 5: mod_base = OTHER; note = 2'-O-methyluridine-3'-phosphate
  modified_base 6: mod_base = OTHER; note = 2'-deoxy-2'-fluoroadenosine-3'-phosphate
  modified_base 7: mod_base = OTHER; note = 2'-O-methyladenosine-3'-phosphate
  modified_base 8: mod_base = OTHER; note = 2'-deoxy-2'-fluoroadenosine-3'-phosphate
  modified_base 9: mod_base = OTHER; note = 2'-deoxy-2'-fluoroadenosine-3'-phosphate
  modified_base 10: mod_base = OTHER; note = 2'-O-methyladenosine-3'-phosphate
  modified_base 11: mod_base = OTHER; note = 2'-O-methylguanosine-3'-phosphate
  modified_base 12: mod_base = OTHER; note = 2'-O-methylcytidine-3'-phosphate
  modified_base 13: mod_base = OTHER; note = 2'-O-methylcytidine-3'-phosphate
  modified_base 14: mod_base = OTHER; note = 2'-deoxy-2'-fluorocytidine-3'-phosphate
  modified_base 15: mod_base = OTHER; note = 2'-O-methyladenosine-3'-phosphate
  modified_base 16: mod_base = OTHER; note = 2'-deoxy-2'-fluorocytidine-3'-phosphate
  modified_base 17: mod_base = OTHER; note = 2'-O-methylcytidine-3'-phosphate
  modified_base 18: mod_base = OTHER; note = 2'-O-methyladenosine-3'-phosphate
  modified_base 19: mod_base = OTHER; note = 2'-O-methylcytidine-3'-phosphate
  modified_base 20: mod_base = OTHER; note = 2'-O-methyladenosine-3'-phosphate
  modified_base 21: mod_base = OTHER; note = 2'-O-methylguanosine-3'-phosphorothioate
  modified_base 22: mod_base = OTHER; note = 2'-O-methylguanosine-3'-phosphorothioate
  modified_base 23: mod_base = OTHER; note = 2'-O-methylguanosine
ttcttaaaaagcccaccacaggg

SEQ ID NO: 750 - RNA, 23 nt, synthetic construct
  source 1..23: mol_type = other RNA
  modified_base 1: mod_base = OTHER; note = 2'-O-methyluridine-3'-phosphorothioate 5'-(E)-Vinylphosphonate
  modified_base 2: mod_base = OTHER; note = 2'-deoxy-2'-fluoroadenosine-3'-phosphorothioate
  modified_base 3: mod_base = OTHER; note = 2'-O-methyladenosine-3'-phosphate
  modified_base 4: mod_base = OTHER; note = 2'-O-methyladenosine-3'-phosphate
  modified_base 5: mod_base = OTHER; note = 2'-O-methyluridine-3'-phosphate
  modified_base 6: mod_base = OTHER; note = 2'-deoxy-2'-fluorocytidine-3'-phosphate
  modified_base 7: mod_base = OTHER; note = 2'-O-methylcytidine-3'-phosphate
  modified_base 8: mod_base = OTHER; note = 2'-deoxy-2'-fluorouridine-3'-phosphate
  modified_base 9: mod_base = OTHER; note = 2'-deoxy-2'-fluorocytidine-3'-phosphate
  modified_base 10: mod_base = OTHER; note = 2'-O-methyluridine-3'-phosphate
  modified_base 11: mod_base = OTHER; note = 2'-O-methyluridine-3'-phosphate
  modified_base 12: mod_base = OTHER; note = 2'-O-methyladenosine-3'-phosphate
  modified_base 13: mod_base = OTHER; note = 2'-O-methyladenosine-3'-phosphate
  modified_base 14: mod_base = OTHER; note = 2'-deoxy-2'-fluoroadenosine-3'-phosphate
  modified_base 15: mod_base = OTHER; note = 2'-O-methyladenosine-3'-phosphate
  modified_base 16: mod_base = OTHER; note = 2'-deoxy-2'-fluoroadenosine-3'-phosphate
  modified_base 17: mod_base = OTHER; note = 2'-O-methylguanosine-3'-phosphate
  modified_base 18: mod_base = OTHER; note = 2'-O-methylcytidine-3'-phosphate
  modified_base 19: mod_base = OTHER; note = 2'-O-methylcytidine-3'-phosphate
  modified_base 20: mod_base = OTHER; note = 2'-O-methylcytidine-3'-phosphate
  modified_base 21: mod_base = OTHER; note = 2'-O-methyladenosine-3'-phosphorothioate
  modified_base 22: mod_base = OTHER; note = 2'-O-methylcytidine-3'-phosphorothioate
  modified_base 23: mod_base = OTHER; note = 2'-O-methylcytidine
taaatcctcttaaaaagcccacc

SEQ ID NO: 751 - RNA, 23 nt, synthetic construct
  source 1..23: mol_type = other RNA
  modified_base 1: mod_base = OTHER; note = 2'-O-methyluridine-3'-phosphorothioate 5'-(E)-Vinylphosphonate
  modified_base 2: mod_base = OTHER; note = 2'-deoxy-2'-fluoroadenosine-3'-phosphorothioate
  modified_base 3: mod_base = OTHER; note = 2'-O-methyladenosine-3'-phosphate
  modified_base 4: mod_base = OTHER; note = 2'-O-methylcytidine-3'-phosphate
  modified_base 5: mod_base = OTHER; note = 2'-O-methylcytidine-3'-phosphate
  modified_base 6: mod_base = OTHER; note = 2'-deoxy-2'-fluoroadenosine-3'-phosphate
  modified_base 7: mod_base = OTHER; note = 2'-O-methylguanosine-3'-phosphate
  modified_base 8: mod_base = OTHER; note = 2'-deoxy-2'-fluorouridine-3'-phosphate
  modified_base 9: mod_base = OTHER; note = 2'-deoxy-2'-fluorouridine-3'-phosphate
  modified_base 10: mod_base = OTHER; note = 2'-O-methyladenosine-3'-phosphate
  modified_base 11: mod_base = OTHER; note = 2'-O-methyladenosine-3'-phosphate
  modified_base 12: mod_base = OTHER; note = 2'-O-methyladenosine-3'-phosphate
  modified_base 13: mod_base = OTHER; note = 2'-O-methyladenosine-3'-phosphate
  modified_base 14: mod_base = OTHER; note = 2'-deoxy-2'-fluorouridine-3'-phosphate
  modified_base 15: mod_base = OTHER; note = 2'-O-methylcytidine-3'-phosphate
  modified_base 16: mod_base = OTHER; note = 2'-deoxy-2'-fluorocytidine-3'-phosphate
  modified_base 17: mod_base = OTHER; note = 2'-O-methyluridine-3'-phosphate
  modified_base 18: mod_base = OTHER; note = 2'-O-methylcytidine-3'-phosphate
  modified_base 19: mod_base = OTHER; note = 2'-O-methyluridine-3'-phosphate
  modified_base 20: mod_base = OTHER; note = 2'-O-methyluridine-3'-phosphate
  modified_base 21: mod_base = OTHER; note = 2'-O-methyladenosine-3'-phosphorothioate
  modified_base 22: mod_base = OTHER; note = 2'-O-methyladenosine-3'-phosphorothioate
  modified_base 23: mod_base = OTHER; note = 2'-O-methyladenosine
taaccagttaaaatcctcttaaa

SEQ ID NO: 752 - RNA, 23 nt, synthetic construct
  source 1..23: mol_type = other RNA
  modified_base 1: mod_base = OTHER; note = 2'-O-methyluridine-3'-phosphorothioate 5'-(E)-Vinylphosphonate
  modified_base 2: mod_base = OTHER; note = 2'-deoxy-2'-fluoroadenosine-3'-phosphorothioate
  modified_base 3: mod_base = OTHER; note = 2'-O-methylcytidine-3'-phosphate
  modified_base 4: mod_base = OTHER; note = 2'-O-methylcytidine-3'-phosphate
  modified_base 5: mod_base = OTHER; note = 2'-O-methylcytidine-3'-phosphate
  modified_base 6: mod_base = OTHER; note = 2'-deoxy-2'-fluorouridine-3'-phosphate
  modified_base 7: mod_base = OTHER; note = 2'-O-methylguanosine-3'-phosphate
  modified_base 8: mod_base = OTHER; note = 2'-deoxy-2'-fluorouridine-3'-phosphate
  modified_base 9: mod_base = OTHER; note = 2'-deoxy-2'-fluorocytidine-3'-phosphate
  modified_base 10: mod_base = OTHER; note = 2'-O-methylcytidine-3'-phosphate
  modified_base 11: mod_base = OTHER; note = 2'-O-methyluridine-3'-phosphate
  modified_base 12: mod_base = OTHER; note = 2'-O-methyluridine-3'-phosphate
  modified_base 13: mod_base = OTHER; note = 2'-O-methylcytidine-3'-phosphate
  modified_base 14: mod_base = OTHER; note = 2'-deoxy-2'-fluorouridine-3'-phosphate
  modified_base 15: mod_base = OTHER; note = 2'-O-methylcytidine-3'-phosphate
  modified_base 16: mod_base = OTHER; note = 2'-deoxy-2'-fluorouridine-3'-phosphate
  modified_base 17: mod_base = OTHER; note = 2'-O-methyluridine-3'-phosphate
  modified_base 18: mod_base = OTHER; note = 2'-O-methylcytidine-3'-phosphate
  modified_base 19: mod_base = OTHER; note = 2'-O-methylcytidine-3'-phosphate
  modified_base 20: mod_base = OTHER; note = 2'-O-methylcytidine-3'-phosphate
  modified_base 21: mod_base = OTHER; note = 2'-O-methyluridine-3'-phosphorothioate
  modified_base 22: mod_base = OTHER; note = 2'-O-methylcytidine-3'-phosphorothioate
  modified_base 23: mod_base = OTHER; note = 2'-O-methylcytidine
taccctgtccttctcttccctcc

SEQ ID NO: 753 - RNA, 23 nt, synthetic construct
  source 1..23: mol_type = other RNA
  modified_base 1: mod_base = OTHER; note = 2'-O-methyluridine-3'-phosphorothioate 5'-(E)-Vinylphosphonate
  modified_base 2: mod_base = OTHER; note = 2'-deoxy-2'-fluorocytidine-3'-phosphorothioate
  modified_base 3: mod_base = OTHER; note = 2'-O-methyluridine-3'-phosphate
  modified_base 4: mod_base = OTHER; note = 2'-O-methyladenosine-3'-phosphate
  modified_base 5: mod_base = OTHER; note = 2'-O-methyluridine-3'-phosphate
  modified_base 6: mod_base = OTHER; note = 2'-deoxy-2'-fluorouridine-3'-phosphate
  modified_base 7: mod_base = OTHER; note = 2'-O-methyluridine-3'-phosphate
  modified_base 8: mod_base = OTHER; note = 2'-deoxy-2'-fluoroadenosine-3'-phosphate
  modified_base 9: mod_base = OTHER; note = 2'-deoxy-2'-fluorocytidine-3'-phosphate
  modified_base 10: mod_base = OTHER; note = 2'-O-methyladenosine-3'-phosphate
  modified_base 11: mod_base = OTHER; note = 2'-O-methyladenosine-3'-phosphate
  modified_base 12: mod_base = OTHER; note = 2'-O-methylguanosine-3'-phosphate
  modified_base 13: mod_base = OTHER; note = 2'-O-methylguanosine-3'-phosphate
  modified_base 14: mod_base = OTHER; note = 2'-deoxy-2'-fluoroguanosine-3'-phosphate
  modified_base 15: mod_base = OTHER; note = 2'-O-methyladenosine-3'-phosphate
  modified_base 16: mod_base = OTHER; note = 2'-deoxy-2'-fluorocytidine-3'-phosphate
  modified_base 17: mod_base = OTHER; note = 2'-O-methyladenosine-3'-phosphate
  modified_base 18: mod_base = OTHER; note = 2'-O-methylcytidine-3'-phosphate
  modified_base 19: mod_base = OTHER; note = 2'-O-methyladenosine-3'-phosphate
  modified_base 20: mod_base = OTHER; note = 2'-O-methylguanosine-3'-phosphate
  modified_base 21: mod_base = OTHER; note = 2'-O-methylguanosine-3'-phosphorothioate
  modified_base 22: mod_base = OTHER; note = 2'-O-methyladenosine-3'-phosphorothioate
  modified_base 23: mod_base = OTHER; note = 2'-O-methylguanosine
tctatttacaagggacacaggag

SEQ ID NO: 754 - RNA, 23 nt, synthetic construct
  source 1..23: mol_type = other RNA
  modified_base 1: mod_base = OTHER; note = 2'-O-methyluridine-3'-phosphorothioate 5'-(E)-Vinylphosphonate
  modified_base 2: mod_base = OTHER; note = 2'-deoxy-2'-fluorocytidine-3'-phosphorothioate
  modified_base 3: mod_base = OTHER; note = 2'-O-methylcytidine-3'-phosphate
  modified_base 4: mod_base = OTHER; note = 2'-O-methyladenosine-3'-phosphate
  modified_base 5: mod_base = OTHER; note = 2'-O-methylguanosine-3'-phosphate
  modified_base 6: mod_base = OTHER; note = 2'-deoxy-2'-fluoroguanosine-3'-phosphate
  modified_base 7: mod_base = OTHER; note = 2'-O-methylguanosine-3'-phosphate
  modified_base 8: mod_base = OTHER; note = 2'-deoxy-2'-fluoroadenosine-3'-phosphate
  modified_base 9: mod_base = OTHER; note = 2'-deoxy-2'-fluoroadenosine-3'-phosphate
  modified_base 10: mod_base = OTHER; note = 2'-O-methylguanosine-3'-phosphate
  modified_base 11: mod_base = OTHER; note = 2'-O-methylguanosine-3'-phosphate
  modified_base 12: mod_base = OTHER; note = 2'-O-methylguanosine-3'-phosphate
  modified_base 13: mod_base = OTHER; note = 2'-O-methyladenosine-3'-phosphate
  modified_base 14: mod_base = OTHER; note = 2'-deoxy-2'-fluoroadenosine-3'-phosphate
  modified_base 15: mod_base = OTHER; note = 2'-O-methylguanosine-3'-phosphate
  modified_base 16: mod_base = OTHER; note = 2'-deoxy-2'-fluoroadenosine-3'-phosphate
  modified_base 17: mod_base = OTHER; note = 2'-O-methylguanosine-3'-phosphate
  modified_base 18: mod_base = OTHER; note = 2'-O-methylguanosine-3'-phosphate
  modified_base 19: mod_base = OTHER; note = 2'-O-methyladenosine-3'-phosphate
  modified_base 20: mod_base = OTHER; note = 2'-O-methylguanosine-3'-phosphate
  modified_base 21: mod_base = OTHER; note = 2'-O-methyladenosine-3'-phosphorothioate
  modified_base 22: mod_base = OTHER; note = 2'-O-methylcytidine-3'-phosphorothioate
  modified_base 23: mod_base = OTHER; note = 2'-O-methylguanosine
tccagggaagggaagaggagacg

SEQ ID NO: 755 - RNA, 23 nt, synthetic construct
  source 1..23: mol_type = other RNA
  modified_base 1: mod_base = OTHER; note = 2'-O-methyluridine-3'-phosphorothioate 5'-(E)-Vinylphosphonate
  modified_base 2: mod_base = OTHER; note = 2'-deoxy-2'-fluorouridine-3'-phosphorothioate
  modified_base 3: mod_base = OTHER; note = 2'-O-methyladenosine-3'-phosphate
  modified_base 4: mod_base = OTHER; note = 2'-O-methyladenosine-3'-phosphate
  modified_base 5: mod_base = OTHER; note = 2'-O-methylcytidine-3'-phosphate
  modified_base 6: mod_base = OTHER; note = 2'-deoxy-2'-fluoroadenosine-3'-phosphate
  modified_base 7: mod_base = OTHER; note = 2'-O-methyladenosine-3'-phosphate
  modified_base 8: mod_base = OTHER; note = 2'-deoxy-2'-fluorouridine-3'-phosphate
  modified_base 9: mod_base = OTHER; note = 2'-deoxy-2'-fluorocytidine-3'-phosphate
  modified_base 10: mod_base = OTHER; note = 2'-O-methyluridine-3'-phosphate
  modified_base 11: mod_base = OTHER; note = 2'-O-methyladenosine-3'-phosphate
  modified_base 12: mod_base = OTHER; note = 2'-O-methyluridine-3'-phosphate
  modified_base 13: mod_base = OTHER; note = 2'-O-methyluridine-3'-phosphate
  modified_base 14: mod_base = OTHER; note = 2'-deoxy-2'-fluorouridine-3'-phosphate
  modified_base 15: mod_base = OTHER; note = 2'-O-methyladenosine-3'-phosphate
  modified_base 16: mod_base = OTHER; note = 2'-deoxy-2'-fluorocytidine-3'-phosphate
  modified_base 17: mod_base = OTHER; note = 2'-O-methyladenosine-3'-phosphate
  modified_base 18: mod_base = OTHER; note = 2'-O-methylcytidine-3'-phosphate
  modified_base 19: mod_base = OTHER; note = 2'-O-methylcytidine-3'-phosphate
  modified_base 20: mod_base = OTHER; note = 2'-O-methylcytidine-3'-phosphate
  modified_base 21: mod_base = OTHER; note = 2'-O-methylguanosine-3'-phosphorothioate
  modified_base 22: mod_base = OTHER; note = 2'-O-methylguanosine-3'-phosphorothioate
  modified_base 23: mod_base = OTHER; note = 2'-O-methylguanosine
ttaacaatctatttacacccggg

SEQ ID NO: 756 - RNA, 23 nt, synthetic construct
  source 1..23: mol_type = other RNA
  modified_base 1: mod_base = OTHER; note = 2'-O-methyluridine-3'-phosphorothioate 5'-(E)-Vinylphosphonate
  modified_base 2: mod_base = OTHER; note = 2'-deoxy-2'-fluorouridine-3'-phosphorothioate
  modified_base 3: mod_base = OTHER; note = 2'-O-methylguanosine-3'-phosphate
  modified_base 4: mod_base = OTHER; note = 2'-O-methylguanosine-3'-phosphate
  modified_base 5: mod_base = OTHER; note = 2'-O-methylguanosine-3'-phosphate
  modified_base 6: mod_base = OTHER; note = 2'-deoxy-2'-fluorocytidine-3'-phosphate
  modified_base 7: mod_base = OTHER; note = 2'-O-methyluridine-3'-phosphate
  modified_base 8: mod_base = OTHER; note = 2'-deoxy-2'-fluoroguanosine-3'-phosphate
  modified_base 9: mod_base = OTHER; note = 2'-deoxy-2'-fluoroguanosine-3'-phosphate
  modified_base 10: mod_base = OTHER; note = 2'-O-methyluridine-3'-phosphate
  modified_base 11: mod_base = OTHER; note = 2'-O-methyluridine-3'-phosphate
  modified_base 12: mod_base = OTHER; note = 2'-O-methylcytidine-3'-phosphate
  modified_base 13: mod_base = OTHER; note = 2'-O-methyluridine-3'-phosphate
  modified_base 14: mod_base = OTHER; note = 2'-deoxy-2'-fluoroadenosine-3'-phosphate
  modified_base 15: mod_base = OTHER; note = 2'-O-methyluridine-3'-phosphate
  modified_base 16: mod_base = OTHER; note = 2'-deoxy-2'-fluorouridine-3'-phosphate
  modified_base 17: mod_base = OTHER; note = 2'-O-methyluridine-3'-phosphate
  modified_base 18: mod_base = OTHER; note = 2'-O-methyladenosine-3'-phosphate
  modified_base 19: mod_base = OTHER; note = 2'-O-methylcytidine-3'-phosphate
  modified_base 20: mod_base = OTHER; note = 2'-O-methyladenosine-3'-phosphate
  modified_base 21: mod_base = OTHER; note = 2'-O-methyladenosine-3'-phosphorothioate
  modified_base 22: mod_base = OTHER; note = 2'-O-methylguanosine-3'-phosphorothioate
  modified_base 23: mod_base = OTHER; note = 2'-O-methylguanosine
ttgggctggttctatttacaagg

SEQ ID NO: 757 - RNA, 23 nt, synthetic construct
  source 1..23: mol_type = other RNA
  modified_base 1: mod_base = OTHER; note = 2'-O-methyluridine-3'-phosphorothioate 5'-(E)-Vinylphosphonate
  modified_base 2: mod_base = OTHER; note = 2'-deoxy-2'-fluoroguanosine-3'-phosphorothioate
  modified_base 3: mod_base = OTHER; note = 2'-O-methyladenosine-3'-phosphate
  modified_base 4: mod_base = OTHER; note = 2'-O-methyladenosine-3'-phosphate
  modified_base 5: mod_base = OTHER; note = 2'-O-methyluridine-3'-phosphate
  modified_base 6: mod_base = OTHER; note = 2'-deoxy-2'-fluorocytidine-3'-phosphate
  modified_base 7: mod_base = OTHER; note = 2'-O-methylguanosine-3'-phosphate
  modified_base 8: mod_base = OTHER; note = 2'-deoxy-2'-fluoroadenosine-3'-phosphate
  modified_base 9: mod_base = OTHER; note = 2'-deoxy-2'-fluorocytidine-3'-phosphate
  modified_base 10: mod_base = OTHER; note = 2'-O-methylguanosine-3'-phosphate
  modified_base 11: mod_base = OTHER; note = 2'-O-methyluridine-3'-phosphate
  modified_base 12: mod_base = OTHER; note = 2'-O-methyluridine-3'-phosphate
  modified_base 13: mod_base = OTHER; note = 2'-O-methyluridine-3'-phosphate
  modified_base 14: mod_base = OTHER; note = 2'-deoxy-2'-fluorouridine-3'-phosphate
  modified_base 15: mod_base = OTHER; note = 2'-O-methylcytidine-3'-phosphate
  modified_base 16: mod_base = OTHER; note = 2'-deoxy-2'-fluorouridine-3'-phosphate
  modified_base 17: mod_base = OTHER; note = 2'-O-methyluridine-3'-phosphate
  modified_base 18: mod_base = OTHER; note = 2'-O-methyluridine-3'-phosphate
  modified_base 19: mod_base = OTHER; note = 2'-O-methyladenosine-3'-phosphate
  modified_base 20: mod_base = OTHER; note = 2'-O-methyladenosine-3'-phosphate
  modified_base 21: mod_base = OTHER; note = 2'-O-methylguanosine-3'-phosphorothioate
  modified_base 22: mod_base = OTHER; note = 2'-O-methyladenosine-3'-phosphorothioate
  modified_base 23: mod_base = OTHER; note = 2'-O-methyladenosine
tgaatcgacgttttctttaagaa

SEQ ID NO: 758 - RNA, 23 nt, synthetic construct
  source 1..23: mol_type = other RNA
  modified_base 1: mod_base = OTHER; note = 2'-O-methyluridine-3'-phosphorothioate 5'-(E)-Vinylphosphonate
  modified_base 2: mod_base = OTHER; note = 2'-deoxy-2'-fluorocytidine-3'-phosphorothioate
  modified_base 3: mod_base = OTHER; note = 2'-O-methylguanosine-3'-phosphate
  modified_base 4: mod_base = OTHER; note = 2'-O-methylguanosine-3'-phosphate
  modified_base 5: mod_base = OTHER; note = 2'-O-methyluridine-3'-phosphate
  modified_base 6: mod_base = OTHER; note = 2'-deoxy-2'-fluoroguanosine-3'-phosphate
  modified_base 7: mod_base = OTHER; note = 2'-O-methylcytidine-3'-phosphate
  modified_base 8: mod_base = OTHER; note = 2'-deoxy-2'-fluoroguanosine-3'-phosphate
  modified_base 9: mod_base = OTHER; note = 2'-deoxy-2'-fluoroadenosine-3'-phosphate
  modified_base 10: mod_base = OTHER; note = 2'-O-methyladenosine-3'-phosphate
  modified_base 11: mod_base = OTHER; note = 2'-O-methyluridine-3'-phosphate
  modified_base 12: mod_base = OTHER; note = 2'-O-methylcytidine-3'-phosphate
  modified_base 13: mod_base = OTHER; note = 2'-O-methylguanosine-3'-phosphate
  modified_base 14: mod_base = OTHER; note = 2'-deoxy-2'-fluoroadenosine-3'-phosphate
  modified_base 15: mod_base = OTHER; note = 2'-O-methylcytidine-3'-phosphate
  modified_base 16: mod_base = OTHER; note = 2'-deoxy-2'-fluoroguanosine-3'-phosphate
  modified_base 17: mod_base = OTHER; note = 2'-O-methyluridine-3'-phosphate
  modified_base 18: mod_base = OTHER; note = 2'-O-methyluridine-3'-phosphate
  modified_base 19: mod_base = OTHER; note = 2'-O-methyluridine-3'-phosphate
  modified_base 20: mod_base = OTHER; note = 2'-O-methyluridine-3'-phosphate
  modified_base 21: mod_base = OTHER; note = 2'-O-methylcytidine-3'-phosphorothioate
  modified_base 22: mod_base = OTHER; note = 2'-O-methyluridine-3'-phosphorothioate
  modified_base 23: mod_base = OTHER; note = 2'-O-methyluridine
tcggtgcgaatcgacgttttctt

SEQ ID NO: 759 - RNA, 23 nt, synthetic construct
  source 1..23: mol_type = other RNA
  modified_base 1: mod_base = OTHER; note = 2'-O-methyluridine-3'-phosphorothioate 5'-(E)-Vinylphosphonate
  modified_base 2: mod_base = OTHER; note = 2'-deoxy-2'-fluoroguanosine-3'-phosphorothioate
  modified_base 3: mod_base = OTHER; note = 2'-O-methyluridine-3'-phosphate
  modified_base 4: mod_base = OTHER; note = 2'-O-methyluridine-3'-phosphate
  modified_base 5: mod_base = OTHER; note = 2'-O-methylguanosine-3'-phosphate
  modified_base 6: mod_base = OTHER; note = 2'-deoxy-2'-fluoroguanosine-3'-phosphate
  modified_base 7: mod_base = OTHER; note = 2'-O-methyladenosine-3'-phosphate
  modified_base 8: mod_base = OTHER; note = 2'-deoxy-2'-fluorocytidine-3'-phosphate
  modified_base 9: mod_base = OTHER; note = 2'-deoxy-2'-fluoroguanosine-3'-phosphate
  modified_base 10: mod_base = OTHER; note = 2'-O-methylguanosine-3'-phosphate
  modified_base 11: mod_base = OTHER; note = 2'-O-methyluridine-3'-phosphate
  modified_base 12: mod_base = OTHER; note = 2'-O-methylguanosine-3'-phosphate
  modified_base 13: mod_base = OTHER; note = 2'-O-methylcytidine-3'-phosphate
  modified_base 14: mod_base = OTHER; note = 2'-deoxy-2'-fluoroguanosine-3'-phosphate
  modified_base 15: mod_base = OTHER; note = 2'-O-methyladenosine-3'-phosphate
  modified_base 16: mod_base = OTHER; note = 2'-deoxy-2'-fluoroadenosine-3'-phosphate
  modified_base 17: mod_base = OTHER; note = 2'-O-methyluridine-3'-phosphate
  modified_base 18: mod_base = OTHER; note = 2'-O-methylcytidine-3'-phosphate
  modified_base 19: mod_base = OTHER; note = 2'-O-methylguanosine-3'-phosphate
  modified_base 20: mod_base = OTHER; note = 2'-O-methyladenosine-3'-phosphate
  modified_base 21: mod_base = OTHER; note = 2'-O-methylcytidine-3'-phosphorothioate
  modified_base 22: mod_base = OTHER; note = 2'-O-methylguanosine-3'-phosphorothioate
  modified_base 23: mod_base = OTHER; note = 2'-O-methyluridine
tgttggacggtgcgaatcgacgt

SEQ ID NO: 760 - RNA, 23 nt, synthetic construct
  source 1..23: mol_type = other RNA
  modified_base 1: mod_base = OTHER; note = 2'-O-methyluridine-3'-phosphorothioate 5'-(E)-Vinylphosphonate
  modified_base 2: mod_base = OTHER; note = 2'-deoxy-2'-fluoroguanosine-3'-phosphorothioate
  modified_base 3: mod_base = OTHER; note = 2'-O-methylguanosine-3'-phosphate
  modified_base 4: mod_base = OTHER; note = 2'-O-methylcytidine-3'-phosphate
  modified_base 5: mod_base = OTHER; note = 2'-O-methylcytidine-3'-phosphate
  modified_base 6: mod_base = OTHER; note = 2'-deoxy-2'-fluoroadenosine-3'-phosphate
  modified_base 7: mod_base = OTHER; note = 2'-O-methylguanosine-3'-phosphate
  modified_base 8: mod_base = OTHER; note = 2'-deoxy-2'-fluoroguanosine-3'-phosphate
  modified_base 9: mod_base = OTHER; note = 2'-deoxy-2'-fluorouridine-3'-phosphate
  modified_base 10: mod_base = OTHER; note = 2'-O-methyluridine-3'-phosphate
  modified_base 11: mod_base = OTHER; note = 2'-O-methylguanosine-3'-phosphate
  modified_base 12: mod_base = OTHER; note = 2'-O-methylguanosine-3'-phosphate
  modified_base 13: mod_base = OTHER; note = 2'-O-methyladenosine-3'-phosphate
  modified_base 14: mod_base = OTHER; note = 2'-deoxy-2'-fluorocytidine-3'-phosphate
  modified_base 15: mod_base = OTHER; note = 2'-O-methylguanosine-3'-phosphate
  modified_base 16: mod_base = OTHER; note = 2'-deoxy-2'-fluoroguanosine-3'-phosphate
  modified_base 17: mod_base = OTHER; note = 2'-O-methyluridine-3'-phosphate
  modified_base 18: mod_base = OTHER; note = 2'-O-methylguanosine-3'-phosphate
  modified_base 19: mod_base = OTHER; note = 2'-O-methylcytidine-3'-phosphate
  modified_base 20: mod_base = OTHER; note = 2'-O-methylguanosine-3'-phosphate
  modified_base 21: mod_base = OTHER; note = 2'-O-methyladenosine-3'-phosphorothioate
  modified_base 22: mod_base = OTHER; note = 2'-O-methyladenosine-3'-phosphorothioate
  modified_base 23: mod_base = OTHER; note = 2'-O-methyluridine
tggccaggttggacggtgcgaat

SEQ ID NO: 761 - RNA, 23 nt, synthetic construct
  source 1..23: mol_type = other RNA
  modified_base 1: mod_base = OTHER; note = 2'-O-methyluridine-3'-phosphorothioate 5'-(E)-Vinylphosphonate
  modified_base 2: mod_base = OTHER; note = 2'-deoxy-2'-fluorouridine-3'-phosphorothioate
  modified_base 3: mod_base = OTHER; note = 2'-O-methylguanosine-3'-phosphate
  modified_base 4: mod_base = OTHER; note = 2'-O-methyladenosine-3'-phosphate
  modified_base 5: mod_base = OTHER; note = 2'-O-methylguanosine-3'-phosphate
  modified_base 6: mod_base = OTHER; note = 2'-deoxy-2'-fluoroguanosine-3'-phosphate
  modified_base 7: mod_base = OTHER; note = 2'-O-methyladenosine-3'-phosphate
  modified_base 8: mod_base = OTHER; note = 2'-deoxy-2'-fluoroguanosine-3'-phosphate
  modified_base 9: mod_base = OTHER; note = 2'-deoxy-2'-fluoroguanosine-3'-phosphate
  modified_base 10: mod_base = OTHER; note = 2'-O-methylguanosine-3'-phosphate
  modified_base 11: mod_base = OTHER; note = 2'-O-methyladenosine-3'-phosphate
  modified_base 12: mod_base = OTHER; note = 2'-O-methylguanosine-3'-phosphate
  modified_base 13: mod_base = OTHER; note = 2'-O-methyluridine-3'-phosphate
  modified_base 14: mod_base = OTHER; note = 2'-deoxy-2'-fluoroadenosine-3'-phosphate
  modified_base 15: mod_base = OTHER; note = 2'-O-methylguanosine-3'-phosphate
  modified_base 16: mod_base = OTHER; note = 2'-deoxy-2'-fluoroadenosine-3'-phosphate
  modified_base 17: mod_base = OTHER; note = 2'-O-methylcytidine-3'-phosphate
  modified_base 18: mod_base = OTHER; note = 2'-O-methylcytidine-3'-phosphate
  modified_base 19: mod_base = OTHER; note = 2'-O-methyluridine-3'-phosphate
  modified_base 20: mod_base = OTHER; note = 2'-O-methyluridine-3'-phosphate
  modified_base 21: mod_base = OTHER; note = 2'-O-methylguanosine-3'-phosphorothioate
  modified_base 22: mod_base = OTHER; note = 2'-O-methylguanosine-3'-phosphorothioate
  modified_base 23: mod_base = OTHER; note = 2'-O-methylguanosine
ttgaggagggagtagaccttggg

SEQ ID NO: 762 - RNA, 23 nt, synthetic construct
  source 1..23: mol_type = other RNA
  modified_base 1: mod_base = OTHER; note = 2'-O-methyluridine-3'-phosphorothioate 5'-(E)-Vinylphosphonate
  modified_base 2: mod_base = OTHER; note = 2'-deoxy-2'-fluoroguanosine-3'-phosphorothioate
  modified_base 3: mod_base = OTHER; note = 2'-O-methyladenosine-3'-phosphate
  modified_base 4: mod_base = OTHER; note = 2'-O-methyladenosine-3'-phosphate
  modified_base 5: mod_base = OTHER; note = 2'-O-methyladenosine-3'-phosphate
  modified_base 6: mod_base = OTHER; note = 2'-deoxy-2'-fluorocytidine-3'-phosphate
  modified_base 7: mod_base = OTHER; note = 2'-O-methyluridine-3'-phosphate
  modified_base 8: mod_base = OTHER; note = 2'-deoxy-2'-fluoroadenosine-3'-phosphate
  modified_base 9: mod_base = OTHER; note = 2'-deoxy-2'-fluoroadenosine-3'-phosphate
  modified_base 10: mod_base = OTHER; note = 2'-O-methylguanosine-3'-phosphate
  modified_base 11: mod_base = OTHER; note = 2'-O-methyladenosine-3'-phosphate
  modified_base 12: mod_base = OTHER; note = 2'-O-methylcytidine-3'-phosphate
  modified_base 13: mod_base = OTHER; note = 2'-O-methyladenosine-3'-phosphate
  modified_base 14: mod_base = OTHER; note = 2'-deoxy-2'-fluorouridine-3'-phosphate
  modified_base 15: mod_base = OTHER; note = 2'-O-methylcytidine-3'-phosphate
  modified_base 16: mod_base = OTHER; note = 2'-deoxy-2'-fluoroadenosine-3'-phosphate
  modified_base 17: mod_base = OTHER; note = 2'-O-methylguanosine-3'-phosphate
  modified_base 18: mod_base = OTHER; note = 2'-O-methylguanosine-3'-phosphate
  modified_base 19: mod_base = OTHER; note = 2'-O-methyladenosine-3'-phosphate
  modified_base 20: mod_base = OTHER; note = 2'-O-methylguanosine-3'-phosphate
  modified_base 21: mod_base = OTHER; note = 2'-O-methylcytidine-3'-phosphorothioate
  modified_base 22: mod_base = OTHER; note = 2'-O-methyluridine-3'-phosphorothioate
  modified_base 23: mod_base = OTHER; note = 2'-O-methylcytidine
tgaaactaagacatcaggagctc

SEQ ID NO: 763 - RNA, 23 nt, synthetic construct
  source 1..23: mol_type = other RNA
  modified_base 1: mod_base = OTHER; note = 2'-O-methyluridine-3'-phosphorothioate 5'-(E)-Vinylphosphonate
  modified_base 2: mod_base = OTHER; note = 2'-deoxy-2'-fluorouridine-3'-phosphorothioate
  modified_base 3: mod_base = OTHER; note = 2'-O-methyladenosine-3'-phosphate
  modified_base 4: mod_base = OTHER; note = 2'-O-methylcytidine-3'-phosphate
  modified_base 5: mod_base = OTHER; note = 2'-O-methyluridine-3'-phosphate
  modified_base 6: mod_base = OTHER; note = 2'-deoxy-2'-fluoroguanosine-3'-phosphate
  modified_base 7: mod_base = OTHER; note = 2'-O-methyluridine-3'-phosphate
  modified_base 8: mod_base = OTHER; note = 2'-deoxy-2'-fluoroguanosine-3'-phosphate
  modified_base 9: mod_base = OTHER; note = 2'-deoxy-2'-fluoroguanosine-3'-phosphate
  modified_base 10: mod_base = OTHER; note = 2'-O-methyladenosine-3'-phosphate
  modified_base 11: mod_base = OTHER; note = 2'-O-methyladenosine-3'-phosphate
  modified_base 12: mod_base = OTHER; note = 2'-O-methyladenosine-3'-phosphate
  modified_base 13: mod_base = OTHER; note = 2'-O-methylcytidine-3'-phosphate
  modified_base 14: mod_base = OTHER; note = 2'-deoxy-2'-fluorouridine-3'-phosphate
  modified_base 15: mod_base = OTHER; note = 2'-O-methyladenosine-3'-phosphate
  modified_base 16: mod_base = OTHER; note = 2'-deoxy-2'-fluoroadenosine-3'-phosphate
  modified_base 17: mod_base = OTHER; note = 2'-O-methylguanosine-3'-phosphate
  modified_base 18: mod_base = OTHER; note = 2'-O-methyladenosine-3'-phosphate
  modified_base 19: mod_base = OTHER; note = 2'-O-methylcytidine-3'-phosphate
  modified_base 20: mod_base = OTHER; note = 2'-O-methyladenosine-3'-phosphate
  modified_base 21: mod_base = OTHER; note = 2'-O-methyluridine-3'-phosphorothioate
  modified_base 22: mod_base = OTHER; note = 2'-O-methylcytidine-3'-phosphorothioate
  modified_base 23: mod_base = OTHER; note = 2'-O-methyladenosine
ttactgtggaaactaagacatca

SEQ ID NO: 764 - RNA, 23 nt, synthetic construct
  source 1..23: mol_type = other RNA
  modified_base 1: mod_base = OTHER; note = 2'-O-methyluridine-3'-phosphorothioate 5'-(E)-Vinylphosphonate
  modified_base 2: mod_base = OTHER; note = 2'-deoxy-2'-fluoroadenosine-3'-phosphorothioate
  modified_base 3: mod_base = OTHER; note = 2'-O-methyladenosine-3'-phosphate
  modified_base 4: mod_base = OTHER; note = 2'-O-methylcytidine-3'-phosphate
  modified_base 5: mod_base = OTHER; note = 2'-O-methylguanosine-3'-phosphate
  modified_base 6: mod_base = OTHER; note = 2'-deoxy-2'-fluoroguanosine-3'-phosphate
  modified_base 7: mod_base = OTHER; note = 2'-O-methyladenosine-3'-phosphate
  modified_base 8: mod_base = OTHER; note = 2'-deoxy-2'-fluoroguanosine-3'-phosphate
  modified_base 9: mod_base = OTHER; note = 2'-deoxy-2'-fluoroguanosine-3'-phosphate
  modified_base 10: mod_base = OTHER; note = 2'-O-methyluridine-3'-phosphate
  modified_base 11: mod_base = OTHER; note = 2'-O-methylcytidine-3'-phosphate
  modified_base 12: mod_base = OTHER; note = 2'-O-methyluridine-3'-phosphate
  modified_base 13: mod_base = OTHER; note = 2'-O-methylguanosine-3'-phosphate
  modified_base 14: mod_base = OTHER; note = 2'-deoxy-2'-fluorouridine-3'-phosphate
  modified_base 15: mod_base = OTHER; note = 2'-O-methyladenosine-3'-phosphate
  modified_base 16: mod_base = OTHER; note = 2'-deoxy-2'-fluorocytidine-3'-phosphate
  modified_base 17: mod_base = OTHER; note = 2'-O-methyladenosine-3'-phosphate
  modified_base 18: mod_base = OTHER; note = 2'-O-methylcytidine-3'-phosphate
  modified_base 19: mod_base = OTHER; note = 2'-O-methyladenosine-3'-phosphate
  modified_base 20: mod_base = OTHER; note = 2'-O-methylguanosine-3'-phosphate
  modified_base 21: mod_base = OTHER; note = 2'-O-methylguanosine-3'-phosphorothioate
  modified_base 22: mod_base = OTHER; note = 2'-O-methylcytidine-3'-phosphorothioate
  modified_base 23: mod_base = OTHER; note = 2'-O-methyladenosine
taacggaggtctgtacacaggca

SEQ ID NO: 765 - RNA, 23 nt, synthetic construct
  source 1..23: mol_type = other RNA
  modified_base 1: mod_base = OTHER; note = 2'-O-methyluridine-3'-phosphorothioate 5'-(E)-Vinylphosphonate
  modified_base 2: mod_base = OTHER; note = 2'-deoxy-2'-fluorouridine-3'-phosphorothioate
  modified_base 3: mod_base = OTHER; note = 2'-O-methyluridine-3'-phosphate
  modified_base 4: mod_base = OTHER; note = 2'-O-methyluridine-3'-phosphate
  modified_base 5: mod_base = OTHER; note = 2'-O-methyladenosine-3'-phosphate
  modified_base 6: mod_base = OTHER; note = 2'-deoxy-2'-fluorouridine-3'-phosphate
  modified_base 7: mod_base = OTHER; note = 2'-O-methyluridine-3'-phosphate
  modified_base 8: mod_base = OTHER; note = 2'-deoxy-2'-fluoroguanosine-3'-phosphate
  modified_base 9: mod_base = OTHER; note = 2'-deoxy-2'-fluoroadenosine-3'-phosphate
  modified_base 10: mod_base = OTHER; note = 2'-O-methyladenosine-3'-phosphate
  modified_base 11: mod_base = OTHER; note = 2'-O-methylcytidine-3'-phosphate
  modified_base 12: mod_base = OTHER; note = 2'-O-methylguanosine-3'-phosphate
  modified_base 13: mod_base = OTHER; note = 2'-O-methylguanosine-3'-phosphate
  modified_base 14: mod_base = OTHER; note = 2'-deoxy-2'-fluoroadenosine-3'-phosphate
  modified_base 15: mod_base = OTHER; note = 2'-O-methylguanosine-3'-phosphate
  modified_base 16: mod_base = OTHER; note = 2'-deoxy-2'-fluoroguanosine-3'-phosphate
  modified_base 17: mod_base = OTHER; note = 2'-O-methyluridine-3'-phosphate
  modified_base 18: mod_base = OTHER; note = 2'-O-methylcytidine-3'-phosphate
  modified_base 19: mod_base = OTHER; note = 2'-O-methyluridine-3'-phosphate
  modified_base 20: mod_base = OTHER; note = 2'-O-methylguanosine-3'-phosphate
  modified_base 21: mod_base = OTHER; note = 2'-O-methyluridine-3'-phosphorothioate
  modified_base 22: mod_base = OTHER; note = 2'-O-methyladenosine-3'-phosphorothioate
  modified_base 23: mod_base = OTHER; note = 2'-O-methylcytidine
ttttattgaacggaggtctgtac

SEQ ID NO: 766 - RNA, 23 nt, synthetic construct
  source 1..23: mol_type = other RNA
  modified_base 1: mod_base = OTHER; note = 2'-O-methyluridine-3'-phosphorothioate 5'-(E)-Vinylphosphonate
  modified_base 2: mod_base = OTHER; note = 2'-deoxy-2'-fluorocytidine-3'-phosphorothioate
  modified_base 3: mod_base = OTHER; note = 2'-O-methyladenosine-3'-phosphate
  modified_base 4: mod_base = OTHER; note = 2'-O-methyladenosine-3'-phosphate
  modified_base 5: mod_base = OTHER; note = 2'-O-methyluridine-3'-phosphate
  modified_base 6: mod_base = OTHER; note = 2'-deoxy-2'-fluoroadenosine-3'-phosphate
  modified_base 7: mod_base = OTHER; note = 2'-O-methyladenosine-3'-phosphate
  modified_base 8: mod_base = OTHER; note = 2'-deoxy-2'-fluorouridine-3'-phosphate
  modified_base 9: mod_base = OTHER; note = 2'-deoxy-2'-fluorouridine-3'-phosphate
  modified_base 10: mod_base = OTHER; note = 2'-O-methyluridine-3'-phosphate
  modified_base 11: mod_base = OTHER; note = 2'-O-methyladenosine-3'-phosphate
  modified_base 12: mod_base = OTHER; note = 2'-O-methyluridine-3'-phosphate
  modified_base 13: mod_base = OTHER; note = 2'-O-methyluridine-3'-phosphate
  modified_base 14: mod_base = OTHER; note = 2'-deoxy-2'-fluoroguanosine-3'-phosphate
  modified_base 15: mod_base = OTHER; note = 2'-O-methyladenosine-3'-phosphate
  modified_base 16: mod_base = OTHER; note = 2'-deoxy-2'-fluoroadenosine-3'-phosphate
  modified_base 17: mod_base = OTHER; note = 2'-O-methylcytidine-3'-phosphate
  modified_base 18: mod_base = OTHER; note = 2'-O-methylguanosine-3'-phosphate
  modified_base 19: mod_base = OTHER; note = 2'-O-methylguanosine-3'-phosphate
  modified_base 20: mod_base = OTHER; note = 2'-O-methyladenosine-3'-phosphate
  modified_base 21: mod_base = OTHER; note = 2'-O-methylguanosine-3'-phosphorothioate
  modified_base 22: mod_base = OTHER; note = 2'-O-methylguanosine-3'-phosphorothioate
  modified_base 23: mod_base = OTHER; note = 2'-O-methyluridine
tcaataatttattgaacggaggt

SEQ ID NO: 767 - RNA, 23 nt, synthetic construct
  source 1..23: mol_type = other RNA
  modified_base 1: mod_base = OTHER; note = 2'-O-methyluridine-3'-phosphorothioate 5'-(E)-Vinylphosphonate
  modified_base 2: mod_base = OTHER; note = 2'-deoxy-2'-fluoroadenosine-3'-phosphorothioate
  modified_base 3: mod_base = OTHER; note = 2'-O-methyladenosine-3'-phosphate
  modified_base 4: mod_base = OTHER; note = 2'-O-methyladenosine-3'-phosphate
  modified_base 5: mod_base = OTHER; note = 2'-O-methylcytidine-3'-phosphate
  modified_base 6: mod_base = OTHER; note = 2'-deoxy-2'-fluorocytidine-3'-phosphate
  modified_base 7: mod_base = OTHER; note = 2'-O-methyluridine-3'-phosphate
  modified_base 8: mod_base = OTHER; note = 2'-deoxy-2'-fluorouridine-3'-phosphate
  modified_base 9: mod_base = OTHER; note = 2'-deoxy-2'-fluoroadenosine-3'-phosphate
  modified_base 10: mod_base = OTHER; note = 2'-O-methylcytidine-3'-phosphate
  modified_base 11: mod_base = OTHER; note = 2'-O-methyluridine-3'-phosphate
  modified_base 12: mod_base = OTHER; note = 2'-O-methylguanosine-3'-phosphate
  modified_base 13: mod_base = OTHER; note = 2'-O-methyluridine-3'-phosphate
  modified_base 14: mod_base = OTHER; note = 2'-deoxy-2'-fluoroguanosine-3'-phosphate
  modified_base 15: mod_base = OTHER; note = 2'-O-methylguanosine-3'-phosphate
  modified_base 16: mod_base = OTHER; note = 2'-deoxy-2'-fluoroadenosine-3'-phosphate
  modified_base 17: mod_base = OTHER; note = 2'-O-methyladenosine-3'-phosphate
  modified_base 18: mod_base = OTHER; note = 2'-O-methyladenosine-3'-phosphate
  modified_base 19: mod_base = OTHER; note = 2'-O-methylcytidine-3'-phosphate
  modified_base 20: mod_base = OTHER; note = 2'-O-methyluridine-3'-phosphate
  modified_base 21: mod_base = OTHER; note = 2'-O-methyladenosine-3'-phosphorothioate
  modified_base 22: mod_base = OTHER; note = 2'-O-methyladenosine-3'-phosphorothioate
  modified_base 23: mod_base = OTHER; note = 2'-O-methylguanosine
taaaccttactgtggaaactaag

SEQ ID NO: 768 - RNA, 23 nt, synthetic construct
  source 1..23: mol_type = other RNA
  modified_base 1: mod_base = OTHER; note = 2'-O-methyluridine-3'-phosphorothioate 5'-(E)-Vinylphosphonate
  modified_base 2: mod_base = OTHER; note = 2'-deoxy-2'-fluoroadenosine-3'-phosphorothioate
  modified_base 3: mod_base = OTHER; note = 2'-O-methylcytidine-3'-phosphate
  modified_base 4: mod_base = OTHER; note = 2'-O-methyladenosine-3'-phosphate
  modified_base 5: mod_base = OTHER; note = 2'-O-methylguanosine-3'-phosphate
  modified_base 6: mod_base = OTHER; note = 2'-deoxy-2'-fluoroguanosine-3'-phosphate
  modified_base 7: mod_base = OTHER; note = 2'-O-methylcytidine-3'-phosphate
  modified_base 8: mod_base = OTHER; note = 2'-deoxy-2'-fluoroadenosine-3'-phosphate
  modified_base 9: mod_base = OTHER; note = 2'-deoxy-2'-fluoroadenosine-3'-phosphate
  modified_base 10: mod_base = OTHER; note = 2'-O-methyladenosine-3'-phosphate
  modified_base 11: mod_base = OTHER; note = 2'-O-methylcytidine-3'-phosphate
  modified_base 12: mod_base = OTHER; note = 2'-O-methylcytidine-3'-phosphate
  modified_base 13: mod_base = OTHER; note = 2'-O-methyluridine-3'-phosphate
  modified_base 14: mod_base = OTHER; note = 2'-deoxy-2'-fluorouridine-3'-phosphate
  modified_base 15: mod_base = OTHER; note = 2'-O-methyladenosine-3'-phosphate
  modified_base 16: mod_base = OTHER; note = 2'-deoxy-2'-fluorocytidine-3'-phosphate
  modified_base 17: mod_base = OTHER; note = 2'-O-methyluridine-3'-phosphate
  modified_base 18: mod_base = OTHER; note = 2'-O-methylguanosine-3'-phosphate
  modified_base 19: mod_base = OTHER; note = 2'-O-methyluridine-3'-phosphate
  modified_base 20: mod_base = OTHER; note = 2'-O-methylguanosine-3'-phosphate
  modified_base 21: mod_base = OTHER; note = 2'-O-methylguanosine-3'-phosphorothioate
  modified_base 22: mod_base = OTHER; note = 2'-O-methyladenosine-3'-phosphorothioate
  modified_base 23: mod_base = OTHER; note = 2'-O-methyladenosine
tacaggcaaaccttactgtggaa

SEQ ID NO: 769 - RNA, 23 nt, synthetic construct
  source 1..23: mol_type = other RNA
  modified_base 1: mod_base = OTHER; note = 2'-O-methyluridine-3'-phosphorothioate 5'-(E)-Vinylphosphonate
  modified_base 2: mod_base = OTHER; note = 2'-deoxy-2'-fluorouridine-3'-phosphorothioate
  modified_base 3: mod_base = OTHER; note = 2'-O-methylcytidine-3'-phosphate
  modified_base 4: mod_base = OTHER; note = 2'-O-methyluridine-3'-phosphate
  modified_base 5: mod_base = OTHER; note = 2'-O-methylguanosine-3'-phosphate
  modified_base 6: mod_base = OTHER; note = 2'-deoxy-2'-fluorouridine-3'-phosphate
  modified_base 7: mod_base = OTHER; note = 2'-O-methyladenosine-3'-phosphate
  modified_base 8: mod_base = OTHER; note = 2'-deoxy-2'-fluorocytidine-3'-phosphate
  modified_base 9: mod_base = OTHER; note = 2'-deoxy-2'-fluoroadenosine-3'-phosphate
  modified_base 10: mod_base = OTHER; note = 2'-O-methylcytidine-3'-phosphate
  modified_base 11: mod_base = OTHER; note = 2'-O-methyladenosine-3'-phosphate
  modified_base 12: mod_base = OTHER; note = 2'-O-methylguanosine-3'-phosphate
  modified_base 13: mod_base = OTHER; note = 2'-O-methylguanosine-3'-phosphate
  modified_base 14: mod_base = OTHER; note = 2'-deoxy-2'-fluorocytidine-3'-phosphate
  modified_base 15: mod_base = OTHER; note = 2'-O-methyladenosine-3'-phosphate
  modified_base 16: mod_base = OTHER; note = 2'-deoxy-2'-fluoroadenosine-3'-phosphate
  modified_base 17: mod_base = OTHER; note = 2'-O-methyladenosine-3'-phosphate
  modified_base 18: mod_base = OTHER; note = 2'-O-methylcytidine-3'-phosphate
  modified_base 19: mod_base = OTHER; note = 2'-O-methylcytidine-3'-phosphate
  modified_base 20: mod_base = OTHER; note = 2'-O-methyluridine-3'-phosphate
  modified_base 21: mod_base = OTHER; note = 2'-O-methyluridine-3'-phosphorothioate
  modified_base 22: mod_base = OTHER; note = 2'-O-methyladenosine-3'-phosphorothioate
  modified_base 23: mod_base = OTHER; note = 2'-O-methylcytidine
ttctgtacacaggcaaaccttac

SEQ ID NO: 770 - RNA, 23 nt, synthetic construct
  source 1..23: mol_type = other RNA
  modified_base 1: mod_base = OTHER; note = 2'-O-methyluridine-3'-phosphorothioate 5'-(E)-Vinylphosphonate
  modified_base 2: mod_base = OTHER; note = 2'-deoxy-2'-fluorouridine-3'-phosphorothioate
  modified_base 3: mod_base = OTHER; note = 2'-O-methylcytidine-3'-phosphate
  modified_base 4: mod_base = OTHER; note = 2'-O-methyladenosine-3'-phosphate
  modified_base 5: mod_base = OTHER; note = 2'-O-methyluridine-3'-phosphate
  modified_base 6: mod_base = OTHER; note = 2'-deoxy-2'-fluoroguanosine-3'-phosphate
  modified_base 7: mod_base = OTHER; note = 2'-O-methylcytidine-3'-phosphate
  modified_base 8: mod_base = OTHER; note = 2'-deoxy-2'-fluorocytidine-3'-phosphate
  modified_base 9: mod_base = OTHER; note = 2'-deoxy-2'-fluoroadenosine-3'-phosphate
  modified_base 10: mod_base = OTHER; note = 2'-O-methyladenosine-3'-phosphate
  modified_base 11: mod_base = OTHER; note = 2'-O-methyluridine-3'-phosphate
  modified_base 12: mod_base = OTHER; note = 2'-O-methyladenosine-3'-phosphate
  modified_base 13: mod_base = OTHER; note = 2'-O-methyladenosine-3'-phosphate
  modified_base 14: mod_base = OTHER; note = 2'-deoxy-2'-fluorouridine-3'-phosphate
  modified_base 15: mod_base = OTHER; note = 2'-O-methyluridine-3'-phosphate
  modified_base 16: mod_base = OTHER; note = 2'-deoxy-2'-fluorouridine-3'-phosphate
  modified_base 17: mod_base = OTHER; note = 2'-O-methyladenosine-3'-phosphate
  modified_base 18: mod_base = OTHER; note = 2'-O-methyluridine-3'-phosphate
  modified_base 19: mod_base = OTHER; note = 2'-O-methyluridine-3'-phosphate
  modified_base 20: mod_base = OTHER; note = 2'-O-methylguanosine-3'-phosphate
  modified_base 21: mod_base = OTHER; note = 2'-O-methyladenosine-3'-phosphorothioate
  modified_base 22: mod_base = OTHER; note = 2'-O-methyladenosine-3'-phosphorothioate
  modified_base 23: mod_base = OTHER; note = 2'-O-methylcytidine
ttcatgccaataatttattgaac

SEQ ID NO: 771 - RNA, 23 nt, synthetic construct
  source 1..23: mol_type = other RNA
ggaaggtgaccacagtcgtagcc

SEQ ID NO: 772 - RNA, 23 nt, synthetic construct
  source 1..23: mol_type = other RNA
tgaccacagtcgtagccactcta

SEQ ID NO: 773 - RNA, 23 nt, synthetic construct
  source 1..23: mol_type = other RNA
agtcgtagccactctaggccaag

SEQ ID NO: 774 - RNA, 23 nt, synthetic construct
  source 1..23: mol_type = other RNA
agagcgctcccaagaagtggctt

SEQ ID NO: 775 - RNA, 23 nt, synthetic construct
  source 1..23: mol_type = other RNA
ctcccaagaagtggcttacacgg

SEQ ID NO: 776 - RNA, 23 nt, synthetic construct
  source 1..23: mol_type = other RNA
acagcgggaaggtgaccacagtc

SEQ ID NO: 777 - RNA, 23 nt, synthetic construct
  source 1..23: mol_type = other RNA
gtggcttacacggacatcaaagt

SEQ ID NO: 778 - RNA, 23 nt, synthetic construct
  source 1..23: mol_type = other RNA
cggacatcaaagtgattggcaat

SEQ ID NO: 779 - RNA, 23 nt, synthetic construct
  source 1..23: mol_type = other RNA
agtgattggcaatggctcatttg

SEQ ID NO: 780 - RNA, 23 nt, synthetic construct
  source 1..23: mol_type = other RNA
cagagaccagggaactagtcgcc

SEQ ID NO: 781 - RNA, 23 nt, synthetic construct
  source 1..23: mol_type = other RNA
ccagggaactagtcgccatcaag

SEQ ID NO: 782 - RNA, 23 nt, synthetic construct
  source 1..23: mol_type = other RNA
aactagtcgccatcaagaaggtt

SEQ ID NO: 783 - RNA, 23 nt, synthetic construct
  source 1..23: mol_type = other RNA
tcgccatcaagaaggttctccag

SEQ ID NO: 784 - RNA, 23 nt, synthetic construct
  source 1..23: mol_type = other RNA
tcaagaaggttctccaggacaag

SEQ ID NO: 785 - RNA, 23 nt, synthetic construct
  source 1..23: mol_type = other RNA
ctccaggacaagaggttcaagaa

SEQ ID NO: 786 - RNA, 23 nt, synthetic construct
  source 1..23: mol_type = other RNA
agaggttcaagaaccgagagctg

SEQ ID NO: 787 - RNA, 23 nt, synthetic construct
  source 1..23: mol_type = other RNA
tcaagaaccgagagctgcagatc

SEQ ID NO: 788 - RNA, 23 nt, synthetic construct
  source 1..23: mol_type = other RNA
accgagagctgcagatcatgcgt

SEQ ID NO: 789 - RNA, 23 nt, synthetic construct
  source 1..23: mol_type = other RNA
agctgcagatcatgcgtaagctg

SEQ ID NO: 790 - RNA, 23 nt, synthetic construct
  source 1..23: mol_type = other RNA
atcatgcgtaagctggaccactg

SEQ ID NO: 791 - RNA, 23 nt, synthetic construct
  source 1..23: mol_type = other RNA
cactgcaatattgtgaggctgag

SEQ ID NO: 792 - RNA, 23 nt, synthetic construct
  source 1..23: mol_type = other RNA
attgtgaggctgagatacttttt

SEQ ID NO: 793 - RNA, 23 nt, synthetic construct
  source 1..23: mol_type = other RNA
aggctgagatactttttctactc

SEQ ID NO: 794 - RNA, 23 nt, synthetic construct
  source 1..23: mol_type = other RNA
agatactttttctactccagtgg

SEQ ID NO: 795 - RNA, 23 nt, synthetic construct
  source 1..23: mol_type = other RNA
tttttctactccagtggcgagaa

SEQ ID NO: 796 - RNA, 23 nt, synthetic construct
  source 1..23: mol_type = other RNA
actccagtggcgagaagaaagac

SEQ ID NO: 797 - RNA, 23 nt, synthetic construct
  source 1..23: mol_type = other RNA
gtggcgagaagaaagacgagctt

SEQ ID NO: 798 - RNA, 23 nt, synthetic construct
  source 1..23: mol_type = other RNA
agaagaaagacgagctttaccta

SEQ ID NO: 799 - RNA, 23 nt, synthetic construct
  source 1..23: mol_type = other RNA
ctggaccactgcaatattgtgag

SEQ ID NO: 800 - RNA, 23 nt, synthetic construct
  source 1..23: mol_type = other RNA
aagacgagctttacctaaatctg

SEQ ID NO: 801 - RNA, 23 nt, synthetic construct
  source 1..23: mol_type = other RNA
agctttacctaaatctggtgctg

SEQ ID NO: 802 - RNA, 23 nt, synthetic construct
  source 1..23: mol_type = other RNA
acctaaatctggtgctggaatat

SEQ ID NO: 803 - RNA, 23 nt, synthetic construct
  source 1..23: mol_type = other RNA
gtgctggaatatgtgcccgagac

SEQ ID NO: 804 - RNA, 23 nt, synthetic construct
  source 1..23: mol_type = other RNA
aatatgtgcccgagacagtgtac

SEQ ID NO: 805 - RNA, 23 nt, synthetic construct
  source 1..23: mol_type = other RNA
tgcccgagacagtgtaccgggtg

SEQ ID NO: 806 - RNA, 23 nt, synthetic construct
  source 1..23: mol_type = other RNA
acttcaccaaggccaagttgacc

SEQ ID NO: 807 - RNA, 23 nt, synthetic construct
  source 1..23: mol_type = other RNA
aaggccaagttgaccatccctat

SEQ ID NO: 808 - RNA, 23 nt, synthetic construct
  source 1..23: mol_type = other RNA
agttgaccatccctatcctctat

SEQ ID NO: 809 - RNA, 23 nt, synthetic construct
  source 1..23: mol_type = other RNA
ccatccctatcctctatgtcaag

SEQ ID NO: 810 - RNA, 23 nt, synthetic construct
  source 1..23: mol_type = other RNA
tcctctatgtcaaggtgtacatg

SEQ ID NO: 811 - RNA, 23 nt, synthetic construct
  source 1..23: mol_type = other RNA
atgtcaaggtgtacatgtaccag

SEQ ID NO: 812 - RNA, 23 nt, synthetic construct
  source 1..23: mol_type = other RNA
cccgccacttcaccaaggccaag

SEQ ID NO: 813 - RNA, 23 nt, synthetic construct
  source 1..23: mol_type = other RNA
tgtaccagctcttccgcagcttg

SEQ ID NO: 814 - RNA, 23 nt, synthetic construct
  source 1..23: mol_type = other RNA
ctcttccgcagcttggcctacat

SEQ ID NO: 815 - RNA, 23 nt, synthetic construct
  source 1..23: mol_type = other RNA
agggcgtgtgtcaccgcgacatc

SEQ ID NO: 816 - RNA, 23 nt, synthetic construct
  source 1..23: mol_type = other RNA
aggtgtacatgtaccagctcttc

SEQ ID NO: 817 - RNA, 23 nt, synthetic construct
  source 1..23: mol_type = other RNA
tgtgtcaccgcgacatcaagccc

SEQ ID NO: 818 - RNA, 23 nt, synthetic construct
  source 1..23: mol_type = other RNA
gcttggcctacatccactcccag

SEQ ID NO: 819 - RNA, 23 nt, synthetic construct
  source 1..23: mol_type = other RNA
ggcagtgcaaagcagttggtccg

SEQ ID NO: 820 - RNA, 23 nt, synthetic construct
  source 1..23: mol_type = other RNA
ggaccctgacactgctgtcctca

SEQ ID NO: 821 - RNA, 23 nt, synthetic construct
  source 1..23: mol_type = other RNA
gacactgctgtcctcaagctctg

SEQ ID NO: 822 - RNA, 23 nt, synthetic construct
  source 1..23: mol_type = other RNA
gggagcccaatgtctcctacatc

SEQ ID NO: 823 - RNA, 23 nt, synthetic construct
  source 1..23: mol_type = other RNA
ccaatgtctcctacatctgttct

SEQ ID NO: 824 - RNA, 23 nt, synthetic construct
  source 1..23: mol_type = other RNA
cctacatctgttctcgctactac

SEQ ID NO: 825 - RNA, 23 nt, synthetic construct
  source 1..23: mol_type = other RNA
tctgcgattttggcagtgcaaag

SEQ ID NO: 826 - RNA, 23 nt, synthetic construct
  source 1..23: mol_type = other RNA
ctgttctcgctactaccgggccc

SEQ ID NO: 827 - RNA, 23 nt, synthetic construct
  source 1..23: mol_type = other RNA
agagctcatctttggagccactg

SEQ ID NO: 828 - RNA, 23 nt, synthetic construct
  source 1..23: mol_type = other RNA
catctttggagccactgattaca

SEQ ID NO: 829 - RNA, 23 nt, synthetic construct
  source 1..23: mol_type = other RNA
tggagccactgattacacctcat

SEQ ID NO: 830 - RNA, 23 nt, synthetic construct
  source 1..23: mol_type = other RNA
actgattacacctcatccatcga

SEQ ID NO: 831 - RNA, 23 nt, synthetic construct
  source 1..23: mol_type = other RNA
tacacctcatccatcgatgtttg

SEQ ID NO: 832 - RNA, 23 nt, synthetic construct
  source 1..23: mol_type = other RNA
tcatccatcgatgtttggtcagc

SEQ ID NO: 833 - RNA, 23 nt, synthetic construct
  source 1..23: mol_type = other RNA
cagctggctgtgtactggcagag

SEQ ID NO: 834 - RNA, 23 nt, synthetic construct
  source 1..23: mol_type = other RNA
tgtactggcagagctcctcttgg

SEQ ID NO: 835 - RNA, 23 nt, synthetic construct
  source 1..23: mol_type = other RNA
ctcttgggccagcccatcttccc

SEQ ID NO: 836 - RNA, 23 nt, synthetic construct
  source 1..23: mol_type = other RNA
accagctggtggagatcatcaag

SEQ ID NO: 837 - RNA, 23 nt, synthetic construct
  source 1..23: mol_type = other RNA
tggtggagatcatcaaggtgctg

SEQ ID NO: 838 - RNA, 23 nt, synthetic construct
  source 1..23: mol_type = other RNA
tcaaggtgctgggaacaccaacc

SEQ ID NO: 839 - RNA, 23 nt, synthetic construct
  source 1..23: mol_type = other RNA
gctgggaacaccaacccgggaac

SEQ ID NO: 840 - RNA, 23 nt, synthetic construct
  source 1..23: mol_type = other RNA
caccaacccgggaacaaatccga

SEQ ID NO: 841 - RNA, 23 nt, synthetic construct
  source 1..23: mol_type = other RNA
cccgggaacaaatccgagagatg

SEQ ID NO: 842 - RNA, 23 nt, synthetic construct
  source 1..23: mol_type = other RNA
ctacacggagttcaagttccctc

SEQ ID NO: 843 - RNA, 23 nt, synthetic construct
  source 1..23: mol_type = other RNA
gagttcaagttccctcagattaa

SEQ ID NO: 844 - RNA, 23 nt, synthetic construct
  source 1..23: mol_type = other RNA
aagttccctcagattaaagctca

SEQ ID NO: 845 - RNA, 23 nt, synthetic construct
  source 1..23: mol_type = other RNA
ccctggacaaaggtgttcaaatc

SEQ ID NO: 846 - RNA, 23 nt, synthetic construct
  source 1..23: mol_type = other RNA
acaaaggtgttcaaatctcgaac

SEQ ID NO: 847 - RNA, 23 nt, synthetic construct
  source 1..23: mol_type = other RNA
gtgttcaaatctcgaacgccgcc

SEQ ID NO: 848 - RNA, 23 nt, synthetic construct
  source 1..23: mol_type = other RNA
agaggccatcgcgctctgctcta

SEQ ID NO: 849 - RNA, 23 nt, synthetic construct
  source 1..23: mol_type = other RNA
catcgcgctctgctctagcctgc

SEQ ID NO: 850 - RNA, 23 nt, synthetic construct
  source 1..23: mol_type = other RNA
gctctagcctgctggagtacacc

SEQ ID NO: 851 - RNA, 23 nt, synthetic construct
  source 1..23: mol_type = other RNA
ctgtgcgcacagcttctttgatg

SEQ ID NO: 852 - RNA, 23 nt, synthetic construct
  source 1..23: mol_type = other RNA
gcacagcttctttgatgaactgc

SEQ ID NO: 853 - RNA, 23 nt, synthetic construct
  source 1..23: mol_type = other RNA
tctttgatgaactgcgatgtctg

SEQ ID NO: 854 - RNA, 23 nt, synthetic construct
  source 1..23: mol_type = other RNA
atgaactgcgatgtctgggaacc

SEQ ID NO: 855 - RNA, 23 nt, synthetic construct
  source 1..23: mol_type = other RNA
tgcgatgtctgggaacccagctg

SEQ ID NO: 856 - RNA, 23 nt, synthetic construct
  source 1..23: mol_type = other RNA
gaacccagctgcctaacaaccgc

SEQ ID NO: 857 - RNA, 23 nt, synthetic construct
  source 1..23: mol_type = other RNA
gctgcctaacaaccgcccacttc

SEQ ID NO: 858 - RNA, 23 nt, synthetic construct
  source 1..23: mol_type = other RNA
ccctctcttcaacttcagtgctg

SEQ ID NO: 859 - RNA, 23 nt, synthetic construct
  source 1..23: mol_type = other RNA
ttcaacttcagtgctggtgaact

SEQ ID NO: 860 - RNA, 23 nt, synthetic construct
  source 1..23: mol_type = other RNA
tcagtgctggtgaactctccatc

SEQ ID NO: 861 - RNA, 23 nt, synthetic construct
  source 1..23: mol_type = other RNA
ctggtgaactctccatccaaccg

SEQ ID NO: 862 - RNA, 23 nt, synthetic construct
  source 1..23: mol_type = other RNA
tctccatccaaccgtctctcaac

SEQ ID NO: 863 - RNA, 23 nt, synthetic construct
  source 1..23: mol_type = other RNA
tccaaccgtctctcaacgccatt

SEQ ID NO: 864 - RNA, 23 nt, synthetic construct
  source 1..23: mol_type = other RNA
cgtctctcaacgccattctcatc

SEQ ID NO: 865 - RNA, 23 nt, synthetic construct
  source 1..23: mol_type = other RNA
caacgccattctcatccctcctc

SEQ ID NO: 866 - RNA, 23 nt, synthetic construct
  source 1..23: mol_type = other RNA
ccgtcctcacaagctttaactga

SEQ ID NO: 867 - RNA, 23 nt, synthetic construct
  source 1..23: mol_type = other RNA
attctcatccctcctcacttgag

SEQ ID NO: 868 - RNA, 23 nt, synthetic construct
  source 1..23: mol_type = other RNA
tcacaagctttaactgagactcc

SEQ ID NO: 869 - RNA, 23 nt, synthetic construct
  source 1..23: mol_type = other RNA
gctttaactgagactccgaccag

SEQ ID NO: 870 - RNA, 23 nt, synthetic construct
  source 1..23: mol_type = other RNA
gaccagctcagactggcagtcga

SEQ ID NO: 871 - RNA, 23 nt, synthetic construct
  source 1..23: mol_type = other RNA
actggcagtcgaccgatgccaca

SEQ ID NO: 872 - RNA, 23 nt, synthetic construct
  source 1..23: mol_type = other RNA
agtcgaccgatgccacacctacc

SEQ ID NO: 873 - RNA, 23 nt, synthetic construct
  source 1..23: mol_type = other RNA
cgatgccacacctaccctcacta

SEQ ID NO: 874 - RNA, 23 nt, synthetic construct
  source 1..23: mol_type = other RNA
acacctaccctcactaactcctc

SEQ ID NO: 875 - RNA, 23 nt, synthetic construct
  source 1..23: mol_type = other RNA
accctcactaactcctcctgagg

SEQ ID NO: 876 - RNA, 23 nt, synthetic construct
  source 1..23: mol_type = other RNA
cccaccaagcacccttccacttc

SEQ ID NO: 877 - RNA, 23 nt, synthetic construct
  source 1..23: mol_type = other RNA
gcacccttccacttccatctggg

SEQ ID NO: 878 - RNA, 23 nt, synthetic construct
  source 1..23: mol_type = other RNA
ggccatagcccatcaagctcctg

SEQ ID NO: 879 - RNA, 23 nt, synthetic construct
  source 1..23: mol_type = other RNA
gggcagaggtaaatgagtccctg

SEQ ID NO: 880 - RNA, 23 nt, synthetic construct
  source 1..23: mol_type = other RNA
agcccatcaagctcctgccctgg

SEQ ID NO: 881 - RNA, 23 nt, synthetic construct
  source 1..23: mol_type = other RNA
agtccctccctcaccagcctcac

SEQ ID NO: 882 - RNA, 23 nt, synthetic construct
  source 1..23: mol_type = other RNA
ccctgtggtgggctttttaagag

SEQ ID NO: 883 - RNA, 23 nt, synthetic construct
  source 1..23: mol_type = other RNA
ggtgggctttttaagaggatttt

SEQ ID NO: 884 - RNA, 23 nt, synthetic construct
  source 1..23: mol_type = other RNA
tttaagaggattttaactggttg

SEQ ID NO: 885 - RNA, 23 nt, synthetic construct
  source 1..23: mol_type = other RNA
ggagggaagagaaggacagggtg

SEQ ID NO: 886 - RNA, 23 nt, synthetic construct
  source 1..23: mol_type = other RNA
ctcctgtgtcccttgtaaataga

SEQ ID NO: 887 - RNA, 23 nt, synthetic construct
  source 1..23: mol_type = other RNA
cgtctcctcttcccttccctggc

SEQ ID NO: 888 - RNA, 23 nt, synthetic construct
  source 1..23: mol_type = other RNA
cccgggtgtaaatagattgttat

SEQ ID NO: 889 - RNA, 23 nt, synthetic construct
  source 1..23: mol_type = other RNA
ccttgtaaatagaaccagcccag

SEQ ID NO: 890 - RNA, 23 nt, synthetic construct
  source 1..23: mol_type = other RNA
ttcttaaagaaaacgtcgattcg

SEQ ID NO: 891 - RNA, 23 nt, synthetic construct
  source 1..23: mol_type = other RNA
aagaaaacgtcgattcgcaccgt

SEQ ID NO: 892 - RNA, 23 nt, synthetic construct
  source 1..23: mol_type = other RNA
acgtcgattcgcaccgtccaacc

SEQ ID NO: 893 - RNA, 23 nt, synthetic construct
  source 1..23: mol_type = other RNA
attcgcaccgtccaacctggccc

SEQ ID NO: 894 - RNA, 23 nt, synthetic construct
  source 1..23: mol_type = other RNA
cccaaggtctactccctcctcac

SEQ ID NO: 895 - RNA, 23 nt, synthetic construct
  source 1..23: mol_type = other RNA
gagctcctgatgtcttagtttcc

SEQ ID NO: 896 - RNA, 23 nt, synthetic construct
  source 1..23: mol_type = other RNA
tgatgtcttagtttccacagtaa

SEQ ID NO: 897 - RNA, 23 nt, synthetic construct
  source 1..23: mol_type = other RNA
tgcctgtgtacagacctccgttc

SEQ ID NO: 898 - RNA, 23 nt, synthetic construct
  source 1..23: mol_type = other RNA
gtacagacctccgttcaataaat

SEQ ID NO: 899 - RNA, 23 nt, synthetic construct
  source 1..23: mol_type = other RNA
acctccgttcaataaattattgg

SEQ ID NO: 900 - RNA, 23 nt, synthetic construct
  source 1..23: mol_type = other RNA
cttagtttccacagtaaggtttg

SEQ ID NO: 901 - RNA, 23 nt, synthetic construct
  source 1..23: mol_type = other RNA
ttccacagtaaggtttgcctgtg

SEQ ID NO: 902 - RNA, 23 nt, synthetic construct
  source 1..23: mol_type = other RNA
gtaaggtttgcctgtgtacagac

SEQ ID NO: 903 - RNA, 23 nt, synthetic construct
  source 1..23: mol_type = other RNA
gttcaataaattattggcatgaa
